(19) United States
(12) Patent Application Publication
(10) Pub. No.: US 2011/0008347 A1
(43) Pub. Date: Jan. 13, 2011

(54) CANCER-RELATED PROTEIN KINASES

(75) Inventors: Axel Ullrich, Munich (DE); Jens Ruhe, Planegg (DE); Stefan Hart, Singapore (SG); Sylvia Street, Planegg (DE); Chee Hong Wong, Singapore (SG); Boon Tin Chua, Singapore (SG); Kiat Han Ho, Singapore (SG)

Correspondence Address: FOLEY & LARDNER LLP, P.O. BOX 80278, SAN DIEGO, CA, 92138-0278, US

(73) Assignee: Agency for Science ,Technology and Research

(21) Appl. No.: 12/517,050

(22) PCT Filed: Dec. 3, 2007
(86) PCT No.: PCT/SG2007/000412

§ 371 Date: Sep. 23, 2010

Related U.S. Application Data
(60) Provisional application No. 60/868,173, filed on Dec. 1, 2006.

(51) Int. Cl. A61K 39/395; C07H 21/00; C12Q 1/68; G01N 33/53; C07H 21/04; C12N 5/10; C12N 9/12; G01N 33/573; A61P 43/00

(52) U.S. Cl. 424/139.1; 536/23.2; 435/6; 435/7.21; 536/24.3; 435/325; 435/194; 435/7.4

(57) ABSTRACT

The present invention relates to mutant kinase polypeptides and kinase variants selected from the group consisting of AATYK (AATK), ABL1, ACK1, ALK, ARG, AXL, BMX, BRK, BTK, CCK4, CSFR1, CSK, DDR1, DDR2, EGFR, EPHA1, EPHA2, EPHA3, EPHA4, EPHA5, EPHA6, EPHA7, EPHA10, EPHB1, EPHB2, EPHB3, EPHB4, EPHB6, FAK, FER, FES, FGFR1, FGFR2, FGFR4, FLT3, FRK, FYN, HER2, HER3, HER4, IGF1R, INSR, ITK, JAK1, JAK2, JAK3, LCK, LMTK2 (AATYK2/BREK), LYN, MATK, MER, MET, NTRK1, NTRK2, NTRK3, PDGRFA, PDGFRB, PTK-9, PYK2, RET, RON, ROR1, ROR2, ROS, RYK, STYK, SYK, TEC, TEK, TIE, TNK1, TXK, TYK2, TYRO3, VEGFR1, VEGFR2, VEGFR3, YES1, and ZAP70, nucleotide sequences encoding the mutant kinase polypeptides and kinase variants, as well as various products and methods useful for the diagnosis and treatment of various kinase-related diseases and conditions, including the screening for and identification of novel protein kinase modulators.

### CROSS-REFERENCE TO RELATED APPLICATIONS

[0001] This application makes reference to and claims the benefit of priority of an application for “Cancer-Related Protein Kinases” filed on Dec. 1, 2006 with the United States Patent and Trademark Office and there duly assigned the U.S. Ser. No. 60/868,173. The contents of said application filed on Dec. 1, 2006 is incorporated herein by reference for all purposes, including an incorporation of any element or part of the description, claims or drawings not contained herein and referred to in Rule 20.5(a) of the PCT, pursuant to Rule 4.18 of the PCT.

### FIELD OF THE INVENTION

[0002] The present invention relates to mutant protein kinases, nucleotide sequences encoding the mutated protein kinases, their use for the diagnosis and treatment of various kinase-related diseases and conditions and the design and identification of novel protein kinase inhibitors.

### BACKGROUND OF THE INVENTION

[0003] The following description of the background of the invention is provided to aid in understanding the invention, but is not admitted to be or to describe prior art to the invention.

[0004] Cancer is the second most common cause of death in developed countries and is a rising health problem in less developed parts of the world. The diagnosis of cancer is connected to great physical and mental suffering for affected individuals and poses a significant burden on the health care system. For many tumors, conventional management strategies, such as surgery, radiation therapy and chemotherapy, have high toxicity with limited efficacy. Thus, an in-depth understanding of the molecular genetics underlying individual malignancies will greatly facilitate the cancer therapeutic problem is now commonly accepted among investigators in the field.

[0005] Autonomous cell growth resulting in tissue invasion and metastasis is the defining feature of all malignant neoplasms. Cancers do not necessarily arise solely as a result of an accelerated rate of cell proliferation. Rather they are the consequence of an imbalance between the rate of cell-cycle progression (cell division) and cell growth (cell mass) on one hand and programmed cell death (apoptosis) on the other. Researchers now recognize that aberrant cellular signal transduction pathways play a vital role in driving this imbalance and hence in malignant transformation.

[0006] Cellular signal transduction is a fundamental mechanism whereby external stimuli that regulate diverse cellular processes are relayed to the interior of cells. One of the key biochemical mechanisms of signal transduction involves the reversible phosphorylation of proteins, which enables regulation of the activity of mature proteins by altering their structure and function.

[0007] Thus, one of the most critical groups of signaling molecules involved in normal and abnormal cellular regulation are the protein kinases, a family of enzymes that catalyze the phosphorylation of amino acid residues of various target molecules. This process controls fundamental cellular processes including cell cycle, migration, metabolism, proliferation, differentiation, and survival.

[0008] Protein kinases are one of the largest families of eukaryotic proteins with several hundred known members. These proteins share a 250-300 amino acid long kinase domain that can be subdivided into 12 distinct subdomains that includes the common catalytic core structure. These conserved protein motifs have recently been exploited using PCR-based cloning strategies leading to a significant expansion of the known kinases.

[0009] The best-characterized protein kinases in eukaryotes phosphorylate proteins on the hydroxyl moiety of serine, threonine and/or tyrosine residues. These kinases largely fall into two groups, those specific for phosphorylating serines and threonines, and those specific for phosphorylating tyrosines. Some kinases, referred to as “dual specificity” kinases, are able to phosphorylate on tyrosine as well as serine/threonine residues.

[0010] Protein kinases can also be characterized by their location within the cell. Some kinases are transmembrane receptor-type proteins capable of directly altering their catalytic activity in response to the external environment such as the binding of a ligand. Others are non-receptor-type proteins lacking any transmembrane domain. They can be found in a variety of cellular compartments from the inner surface of the cell membrane to the nucleus.

[0011] Many kinases are involved in regulatory cascades wherein their substrates may include other kinases whose activities are regulated by their phosphorylation state. Ultimately the activity of some downstream effector is modulated by phosphorylation resulting from activation of such a pathway.

[0012] Protein tyrosine phosphorylation, mediated by protein tyrosine kinases, is a key mechanism underlying signal transduction pathways that regulate fundamental cellular processes such as proliferation, differentiation, motility and cell survival. Deregulation of kinase activity, caused by genetic alterations, modulated expression levels, or the loss of negative regulatory control mechanisms has been described for various members of the tyrosine kinase family, and in many cases has been implicated in the development of human cancer (Blume-Jensen, P., & Hunter, T., Nature 411, 355-365 (2001)). Consequently, tyrosine kinases have become rational targets for therapeutic intervention using both monoclonal antibodies and small molecule drugs.

[0013] First hints for genetically modified tyrosine kinases to be involved in the development of cancer came from viral oncogenes which in several cases have been shown to represent altered versions of cellular receptor tyrosine kinases. The avian erythroblastosis gene v-erbB for example has been identified as a truncated and mutated version of the human epidermal growth factor receptor EGFR (e.g. Downward, J., et al. Nature 311, 483-485, (1984)), which for the first time connected an animal oncogene with a human gene that encoded a cell growth controlling membrane protein, Furthermore, v-fms was found to represent a deleted form of the macrophage CSF-1 receptor (Coussens, L., et al. Nature 320, 277-280 (1986); Sherr, C. J., et al., Cell 41, 665-676 (1985)), and the identified truncations, deletions and mutations were speculated to form the genetic basis for the conversion of a proto-oncogene into an oncogene that can cause malignant cancer in animals.

[0014] These observations stimulated a massive search for genetic alterations of tyrosine kinases in human cancer. Several deletions and point mutations were described that result in increased catalytic activity of the EGFR. The most prevalent in tumors was found to be EGFRvIII, an EGFR deletion mutant that lacks exons 2-7, which can arise from gene rearrangement or alternative mRNA splicing (Malden, L. T., et al., Cancer Res 48, 2711-2714 (1988)). Amplification of the HER2 gene (Coussens, L., et al., Science 230, 1132-1139 (1985))—another member of the EGFR family—was discovered as a genetic abnormality occurring in 30% of invasive human breast cancer, and a significant correlation between HER2 overexpression in tumors and reduced patient survival could be demonstrated (Slamon, D. J., et al., Science 235, 177-182 (1987)). These findings established HER2 as a prognostic marker and led to evaluate the concept of target-specific cancer therapy. In 1998, it culminated in the FDA-approval of Herceptin, a humanized monoclonal against HER2 and the first targeted anti-kinase therapeutic agent based on genomic research.

[0015] Since then it became more and more obvious that even single genetic changes were able to mediate oncogenic potential to a given kinase. This was first shown for neu, the rat homologue of the human HER2 gene, where the replacement of a single valine within the transmembrane domain by glutamic acid resulted in activation of p185 and tumorigenic activity of the modified neu proto-oncogene (Bargmann, C. I., et al., Cell 45, 649-657 (1986)). Other very well known genetic variations in tyrosine kinase genes that are associated with cancer are the BCR-ABL oncogene, a reciprocal translocation between chromosomes 9 and 22 in chronic myelogenous leukaemia (CML), and KIT receptor point mutations in gastrointestinal stromal tumors (GISTs) (Corless, C. L., et al., J Mol. Diagn. 6, 366-370 (2004))—both being targeted by the small molecule imatinib (Gleevec, Novartis) (Demetri, G. D., Eur. J. Cancer 38 Suppl 5, S52-S59 (2002); Peggs, K. & Mackinnon, S., N. Engl. J. Med. 348, 1048-1050 (2003)).

[0016] In addition to their significant role in disease initiation or progression, specific mutations could be shown to mediate and thus predict sensitivity towards specific small molecule inhibitors such as imatinib or gefitinib (Iressa, AstraZeneca). Two independent groups recently described the identification of mutations clustered around the ATP binding pocket of the EGFR kinase domain and demonstrated their occurrence primarily in patients with Iressa-responsive lung cancer (Lynch, T. J., et al., N. Engl. J. Med. 350, 2129-2139 (2004); Paez, J. G., et al., Science 304, 1497-1500 (2004)).

[0017] Therefore, significant efforts have been undertaken to screen for mutations in tyrosine kinase encoding genes on the level of genomic DNA, and comprehensive studies focusing on the kinase domain in colorectal cancer (Bardelli, A., et al., Science 300, 949 (2003)) or selected tumor types (Bignell, G., et al., Genes, Chromosomes & Cancer 45:42-46 (2006) (2006); Davies, H., et al., et al., Cancer Res. 65:17, 7591-7595 (2005); Stephens, P., et al., Nature 431:525-526 (2004)) have recently been reported.

[0018] For decades the traditional approach to identify cancer genes was to hand-pick likely candidates and then search for mutations within them. But since the completion of the draft human genome sequence in 2000, scientists have had the tools to go after cancer mutations in a more global and systematic way.

[0019] Scientists of the post-genome era can examine the sequences of thousands of genes in cancer cells. But because of the expense and technical limitations of current sequencing technologies, groups have for now been focusing on specific sets of genes rather than attempting to go after all of them at once.

[0020] DNA sequencing, although a major component, is only one part of the process of finding cancer mutations. Indeed cancer can arise from small mutations in the DNA sequences, changes in the number of copies of specific genes, rearrangements affecting entire chromosomes, and even from tumor viruses that land inside or next to human genes. In addition, epigenetic changes are also thought to play a role in cancer.

[0021] However, the large variation in molecular changes from one tumor to another, and even within the same tumor from one cell to another, has long been an obstacle for the development of effective therapies. Recent studies provided the first clear demonstration of the vast array of mutations present in cancer cells and identified close to 200 mutations in protein kinase genes in lung tumors, indicating that many mutated protein kinases may be contributing to lung cancer development but that mutations in any one gene are infrequent.

[0022] For some tumors one will thus find high frequency mutations that will make good drug targets, but many will be a mixture of different low frequency mutations.

[0023] Beyond the challenge of obtaining accurate DNA sequence on such large scale, researches have to sift through the hundreds of changes identified in any one set of genes and determine which are specific to cancer and which are normal changes that occur in DNA of any individual (polymorphisms).

[0024] This problem can be addressed by comparing each cancer sequence to that of DNA taken from normal cells of the same patient. Polymorphisms should be present in both samples whereas cancer-specific changes should be present only in the cancer DNA.

[0025] The present invention relates to the identification of protein kinase mutations prevalent in human malignancies as well as methods of use of such mutated protein kinases. The invention further relates to germline variations in kinase genes that are related to tumor development and progression.

### SUMMARY OF THE INVENTION

[0026] Thus, in a first aspect the invention provides an isolated, enriched, or purified nucleic acid molecule. The nucleic acid molecule encodes a mutant of a protein kinase polypeptide. The protein kinase is one of FGFR4, FGFR1, Tyro3, TEC, CSK and Ack1. Further, the mutant of the protein kinase polypeptide encoded by the nucleic acid molecule includes at least one mutation of FGFR4 Y367C, FGFR1 P252S, Tyro3 S531L, Tyro3 P822L, TEC L89R, TEC W531R, TEC P587L, CSK Q26X and ACK1 S985N.

[0027] In a second aspect invention provides a method of identifying a cell that is resistant to apoptosis inducing reagents, i.e. a cell that is chemoresistant. The method includes measuring in the cell the expression of the protein kinase Tyro3, or identifying the amino acid at position 531 and/or 822 of the expressed protein kinase Tyro3, or identifying the amino acid at position 89, 531 and/or 587 of the expressed protein kinase TEC. Where the method includes measuring in the cell the expression of the protein kinase Tyro3 the result of the measurement obtained is further compared with that of a control measurement. An increased expression of protein kinase Tyro3 indicates resistance of the cell to apoptosis inducing reagents. Where the method includes identifying the amino acid at position 531 and/or 822 of the expressed protein kinase Tyro3, the presence of Leucine at position 531 instead of Serine and/or the presence of Leucine at position 822 instead of Proline indicates increased resistance of the cell to apoptosis inducing reagents. Where the method includes identifying the amino acid at position 89, 531 and/or 587 of the expressed protein kinase Tec, the presence of Arginine at position 89 instead of Leucine, the presence of Arginine at position 531 instead of Tryptophan, and/or the presence of Leucine at position 587 instead of Proline indicates increased resistance of the cell to apoptosis inducing reagents.

[0028] In a third aspect invention provides a method of identifying a cell that has a predisposition to transform into a cancer cell. The method includes either identifying the amino acid at position 367 of the expressed protein kinase FGFR4 and/or the amino acid at position 252 of the expressed protein kinase FGFR1, or identifying the amino acid at position 362 of the expressed protein kinase TYK2, or identifying the amino acid at position 26 of the expressed protein kinase C-terminal Src kinase (CSK), and/or identifying the amino acid at position 985 of the expressed protein kinase Ack1. Where the method includes identifying the amino acid at position 367 of the expressed protein kinase FGFR4 and/or the amino acid at position 252 of the expressed protein kinase FGFR1, the presence of Cysteine at position 367 of the expressed protein kinase FGFR4 instead of Tyrosine and/or the presence of Serine at position 252 of the expressed protein kinase FGFR1 instead of Proline indicates an increased predisposition to transform into a cancer cell. Where the method includes identifying the amino acid at position 362 of the expressed protein kinase TYK2, the presence of Phenylalanine at position 362 of the expressed protein kinase TYK2 instead of Valine indicates an increased predisposition to transform into a cancer cell. Where the method includes identifying the amino acid at position 26 of the expressed protein kinase C-terminal Src kinase (CSK), the presence of an amino acid different from Glutamine at position 26 of the expressed protein kinase CSK indicates an increased predisposition to transform into a cancer cell. Where the method includes identifying the amino acid at position 985 of the expressed protein kinase Ack1, the presence of Asparagine at position 985 of the expressed protein kinase Ack1 instead of Serine indicates an increased predisposition to transform into a cancer cell.

[0029] In a fourth aspect the invention provides an isolated, enriched, or purified nucleic acid molecule encoding a mutant kinase polypeptide selected from the group consisting of AATYK (AATK), ABL1, ACK1, ALK, ARG, AXL, BMX, BRK, BTK, CCK4, CSK, DDR1, DDR2, EGFR, EPHA2, EPHA3, EPHA4, EPHA5, EPHA6, EPHB1, EPHB2, EPHB3, EPHB4, EPHB6, FAK, FER, FES, FGFR1, FGFR2, FGFR4, FLT3, FRK, FYN, HER2, HER3, HER4, IGF1R, INSR, ITK, JAK1, JAK2, JAK3, LCK, LMTK2 (AATYK2/BREK), LYN, MER, MET, NTRK1, NTRK2, NTRK3, PDGRFA, PTK-9, PYK2, RET, RON, ROR1, ROR2, ROS, RYK, SYK, TEC, TEK, TIE, TNK1, TYK2, TYRO3, VEGFR1, VEGFR2, YES1, and ZAP70.

[0030] The mutant kinase polypeptides encoded by the nucleic acid molecules according to the invention include at least one of the mutations AATYK F1195C, ABL1 G417E, ABL1 N789S, ABL1 G883fsX12, ACK1 H37Y, ACK1 E111K, ACK1 R127H, ACK1 M393T, ACK1 A634T, ACK1 S699N, ACK1 P731L, ACK1 R748W, ACK1 G947D, ACK1 S985N, ALK G1580V, ARG E332K, ARG V345A, ARG K450R, ARG M657I, ARG P665T, ARG R668C, ARG Q696H, ARG K930R, ARG S968F, ARG Q994H, AXL M569I, AXL M589K, AXL G835V, BMX A150D, BMX S254del, BMX N2671, BRK W78fsX58, BTK M4891, BTK W588C, CCK4 D106N, CCK4 T410S, CCK4 M746L, CCK4 Q913H, CSK Q26X, DDR1R60C, DDR1 V100A, DDR1 R248W, DDR2 M117I, DDR2 R478c, EGFR N115K, EGFR A289V, EGFR P332S, EGFR I646L, EGFR T678M, EGFR P753S, EGFR E922K, EGFR A1118T, EPHA2 R315Q, EPHA2 H333R, EPHA2 G391R, EPHA2 P460L, EPHA2 H609Y, EPHA2 M631T, EPHA2 G662S, EPHA2 V747I, EPHA2 L836R, EPHA2 E911K, EPHA2 V936M, EPHA2 R950 W, EPHA3 S46F, EPHA3 E53K, EPHA3 A777G, EPHA4 V234F, EPHA4 S803A, EPHA4 M877V, EPHA5 N81T, EPHA5 E85K, EPHA5 A672T, EPHA5 V891L, EPHA5 A957T, EPHA5 R981L, EPHA6 N291H, EPHA6 G513E, EPHA6 L622F, EPHB1 A39V, EPHB1 I837M, EPHB2 A83V, EPHB2 S98R, EPHB2 V136M, EPHB2 R270Q, EPHB2 P273L, EPHB2 R369Q, EPHB2 E686K, EPHB2 V762L, EPHB3 P6del, EPHB3 A517V, EPHB4 P231S, EPHB4 V547M, EPHB4 D576G, EPHB4 I610T, EPHB4 E890D, EPHB4 A955V, EPHB6 G353_E471del, EPHB6 A369T, EPHB6 L580F, EPHB6 E615K, EPHB6 A647V, EPHB6 S785R, EPHB6 R811C, FAK S329I, FAK Q440R, FAK A472V, FAK P901S, FER I240T, FER Q526L, FER Q599R, FES M323V, FES L690M, FES V724M, FGFR1 R78H, FGFR1 P252S, FGFR1 A268S, FGFR1 G539_K540del, FGFR2 I526T, FGFR4Y367C, FLT3 V194M, FLT3 D358V, FLT3 V557I, FLT3 G757E, FLT3 R849H, FRK R64Q, FRK G119A, FRK R406H, FYN E521K, HER2 G518V, HER2 A830V, HER2 E930D, HER2 G1015E, HER2 A1216D, HER3 N126K, HER3 R611W, HER3 R667H, HER3 R1077W, HER3 R1089W, HER3 P1142H, HER3 L1177I, HER4 L753V, HER4 G936R, IGF1R T104M, IGF1R Y201H, IGF1R N209S, INSR L9911, ITK R448H, JAK1 I363V, JAK1 R494C, JAK1 N849fsX16, JAK2 F85S, JAK2 A377E, JAK2 L383P, JAK2 G571S, JAK2 E592K, JAK2 R1063H, JAK2 N1108S, JAK3 G62fsX47, JAK3 M511I, JAK3 P693L, JAK3 E698K, LCK L36fsX8, LCK F151S, LCK R484W, LMTK2 Q238P, LMTK2 A251T, LMTK2 G518V, LMTK2 D523Y, LMTK2 M758V, LMTK2 D793G, LMTK2 R828Q, LMTK2 L879M, LMTK2 A1008V, LYN F130V, MER E831Q, MET T171, MET P366S, MET S691L, NTRK1 P453fsX15, NTRK1 L585fsX73, NTRK1 G595E, NTRK1 R748W, NTRK2 A586V, NTRK2 V6221, NTRK2 A647fsX54, NTRK3 V530fsX6, NTRK3 G608D, NTRK3 A631fsX33, PDGFRA G79D, PTK-9 D258E, PTK-9 K265R, PTK-9 N333S, PYK2 S9I, PYK2 C395Y, PYK2 E404Q, PYK2 D424Y, PYK2 E798Q, PYK2 M885L, PYK2 T978M, RET A750T, RON F574fsX23, RON Q955H, RON A1022_K1090del, RON V1070fsX12, ROR1 R185H, ROR1 R429Q, ROR1 S870I, ROR1 P883S, ROR2 R302H, ROR2 C389R, ROR2D390fsX46, ROR2 P548S, ROS R187M, ROS D709fsX16, ROS Q865fsX90, ROS A1443S, RYK H250R, RYK R504H, RYK A559T, SYK M34fsX3, SYK 1262L, SYK E315K, SYK A353T, SYK R520S, SYK V622A, TEC L89R, TEC W531R, TEC P587L, TEK A615T, TEK A1006T, TIE S470L, TIE M871T, TNK1 A299D, TYK2 A53T, TYK2 S340fsX26, TYK2 R701T, TYK2 D883N, TYK2 R901Q, TYK2 A928V, TYK2 P1104A, TYRO3 S324C, TYRO3 E489K, TYRO3 S531L, TYRO3 N788T, TYRO3 P822L, VEGFR1 G203W, VEGFR1 S437L, VEGFR1 A673V, VEGFR1 R781Q, VEGFR1 M938V, VEGFR2 E107K, VEGFR2 P1280S, YES1 K113Q, ZAP70 T155M, and ZAP70 M549V.

[0031] In some embodiments, the invention features isolated, enriched, or purified nucleic acid molecules encoding a mutant kinase polypeptide comprising, consisting essentially of or consisting of a nucleotide sequence that: (a) encodes a polypeptide having the amino acid sequence set forth in SEQ ID Nos: 1-256 or any variant, isoform or fragment thereof, with the proviso that the mutated position or region is retained; (b) is the complement of the nucleotide sequence of (a).

[0032] In another embodiment, the invention is directed to an isolated, enriched, or purified nucleic acid molecule encoding a kinase polypeptide variant selected from the group consisting of AATYK (AATK), ACK1, AXL, CCK4, EPHA1, EPHA2, EPHA3, EPHB3, FAK, FES, HER2, LMTK2 (AATYK2/BREK), MATK, MER, NTRK3, PDGRFA, PDGFRB, PTK-9, PYK2, RON, ROS, RYK, TEK, TNK1, TXK, TYK2, VEGFR1, VEGFR2, VEGFR3, and ZAP70.

[0033] The kinase variant encoded by the nucleic acid molecules according to the invention includes at least one of the germline alterations AATYK G600C, AATYK G641S, AATYK F1163S, AATYK T1227M, ACK1 P725L, AXL G517S, CCK4 P693L, CCK4 A777V, CCK4 S795R, EPHA1 S936L, EPHA2 R876H, EPHA3 I564V, EPHB3 R514Q, FAK L926delins-PWRL, FES P397R, FES S72_K129del, FES E413fsX131, HER2 R1161Q, LMTK2 S910I, MATK A496T, MER E823Q, NTRK3 E402_F410delinsV, NTRK3 G466_Y529delinsD, NTRK3 R711_V712ins16, PDGFRA L221F, PDGFRA S478P, PDGFRB T464M, PTK-9 E195_V196insRPEDHIG, PYK2 G414V, RON Q473_D515del, RON R627fsX23, RON R813_C814insQ, ROS C76fsX, RYK F516L, TEK V600L, TNK1 D472_R473del, TNK1 M598fsX5, TXK R63C, TXK Y414fsX15, TYK2 E971fsX67, VEGFR1 Y642H, VEGFR1 E982A, VEGFR1 P1201L, VEGFR2 C482R, VEGFR3 R1321Q and ZAP70 K186fsX,

[0034] In some embodiments, the invention features isolated, enriched, or purified nucleic acid molecules encoding a kinase variant comprising, consisting essentially of or consisting of a nucleotide sequence that: (a) encodes a polypeptide having the amino acid sequence set forth in SEQ ID Nos: 513-516, 519, 524-525, 527-528, 533, 537-538, 543, 547-550, 562, 571-573, 583-587, 589-591, 598, 600-601, 607, 616, 620-621, 623-624, 626, 630, 632-634, 637, and 640-641 or any variant, isoform or fragment thereof, with the proviso that the altered position or region is retained; (b) is the complement of the nucleotide sequence of (a).

[0035] The nucleic acid may be isolated from a natural source by cDNA cloning or by subtractive hybridization. The natural source may be mammalian, for example, of murine, human, porcine, canine, or bovine origin. The polypeptide can be isolated from every suitable sample, including cultured cells, a biopsy, blood, semen, or any tissue derived from an organ, for example, skin, liver, pancreas to name only a few illustrative examples. In another aspect, the nucleic acid may be synthesized by the triester method or by using an automated DNA synthesizer.

[0036] In other embodiments, the invention features isolated, enriched, or purified nucleic acid molecules encoding mutant kinase polypeptides, further comprising a vector or promoter effective to initiate transcription in a host cell.

[0037] In a fifth aspect the invention also features a recombinant nucleic acid, for instance in a cell or an organism. The recombinant nucleic acid may include, consist essentially of or consist of a sequence set forth in SEQ ID Nos:257-512, 643-646, 649, 654-655, 657-658, 663, 667-668, 673, 677-680, 692, 701-703, 713-717, 719-721, 728, 730-731, 737, 746, 750-751, 753-754, 756, 760, 762-764, 767, and 770-771, or a functional derivative thereof and, optionally, a vector or a promoter effective to initiate transcription in a host cell. The recombinant nucleic acid can alternatively contain a transcriptional initiation region functional in a cell, a sequence complementary to an RNA sequence encoding a kinase polypeptide and a transcriptional termination region functional in a cell. Specific vectors and host cell combinations are discussed herein.

[0038] In yet other embodiments, the nucleic acid is useful for the design of hybridization probes to facilitate identification and cloning of mutated kinase polypeptides or kinase variants, the design of PCR probes to facilitate cloning of mutated kinase polypeptides or kinase variants, obtaining antibodies to mutated kinase polypeptide or kinase variants, and designing antisense oligonucleotides.

[0039] In a sixth aspect, the invention provides a nucleic acid probe for the detection of a nucleic acid that encodes a mutant kinase polypeptide in a sample. The mutant kinase polypeptide is selected from the group consisting of AATYK (AATK), ABL1, ACK1, ALK, ARG, AXL, BMX, BRK, BTK, CCK4, CSK, DDR1, DDR2, EGFR, EPHA2, EPHA3, EPHA4, EPHA5, EPHA6, EPHB1, EPHB2, EPHB3, EPHB4, EPHB6, FAK, FER, FES, FGFR1, FGFR2, FGFR4, FLT3, FRK, FYN, HER2, HER3, HER4, IGF1R, INSR, ITK, JAK1, JAK2, JAK3, LCK, LMTK2 (AATYK2/BREK), LYN, MER, MET, NTRK1, NTRK2, NTRK3, PDGRFA, PTK-9, PYK2, RET, RON, ROR1, ROR2, ROS, RYK, SYK, TEC, TEK, TIE, TNK1, TYK2, TYRO3, VEGFR1, VEGFR2, YES1, and ZAP70, comprising at least one of the mutations AATYK F1195C, ABL1 G417E, ABL1 N789S, ABL1 G883fsX12, ACK1 H37Y, ACK1 E111K, ACK1 R127H, ACK1 M393T, ACK1 A634T, ACK1 S699N, ACK1 P731L, ACK1 R748W, ACK1 G947D, ACK1 S985N, ALK G1580V, ARG E332K, ARG V345A, ARG K450R, ARG M657I, ARG P665T, ARG R668C, ARG Q696H, ARG K930R, ARG S968F, ARG Q994H, AXL M5691, AXL M589K, AXL G835V, BMX A150D, BMX S254del, BMX N267I, BRK W78fsX58, BTK M489I, BTK W588C, CCK4 D106N, CCK4 T410S, CCK4 M746L, CCK4 Q913H, CSK Q26X, DDR1 R60C, DDR1 V100A, DDR1 R248W, DDR2 M117I, DDR2 R478C, EGFR N115K, EGFR A289V, EGFR P332S, EGFR 1646L, EGFR T678M, EGFR P753S, EGFR E922K, EGFR A1118T, EPHA2 R315Q, EPHA2 H333R, EPHA2 G391R, EPHA2 P460L, EPHA2 H609Y, EPHA2 M631T, EPHA2 G662S, EPHA2 V747I, EPHA2 L836R, EPHA2 E911K, EPHA2 V936M, EPHA2 R950 W, EPHA3 S46F, EPHA3 E53K, EPHA3 A777G, EPHA4 V234F, EPHA4 S803A, EPHA4 M877V, EPHA5 N81T, EPHA5 E85K, EPHA5 A672T, EPHA5 V891L, EPHA5 A957T, EPHA5 R981L, EPHA6 N291H, EPHA6 G513E, EPHA6 L622F, EPHB1 A39V, EPHB1 I837M, EPHB2 A83V, EPHB2 S98R, EPHB2 V136M, EPHB2 R270Q, EPHB2 P273L, EPHB2 R369Q, EPHB2 E686K, EPHB2 V762L, EPHB3 P6del, EPHB3 A517V, EPHB4 P231S, EPHB4 V547M, EPHB4 D576G, EPHB4 I610T, EPHB4 E890D, EPHB4 A955V, EPHB6 G353_E471del, EPHB6 A369T, EPHB6 L580F, EPHB6 E615K, EPHB6 A647V, EPHB6 S785R, EPHB6 R811C, FAK S329I, FAK Q440R, FAK A472V, FAK P901S, FER I240T, FER Q526L, FER Q599R, FES M323V, FES L690M, FES V724M, FGFR1 R78H, FGFR1 P252S, FGFR1 A268S, FGFR1 G539_K540del, FGFR21526T, FGFR4 Y367C, FLT3 V194M, FLT3 D358V, FLT3 V557I, FLT3 G757E, FLT3 R849H, FRK R64Q, FRK G119A, FRK R406H, FYN E521K, HER2 G518V, HER2 A830V, HER2 E930D, HER2 G1015E, HER2 A1216D, HER3 N126K, HER3 R611W, HER3 R667H, HER3 R1077W, HER3 R1089W, HER3 P1142H, HER3 L1177I, HER4 L753V, HER4 G936R, IGF1R T104M, IGF1R Y201H, IGF1R N209S, INSR L991I, ITK R448H, JAK1 I363V, JAK1 R494C, JAK1 N849fsX16, JAK2 F85S, JAK2 A377E, JAK2 L383P, JAK2 G571S, JAK2 E592K, JAK2 R1063H, JAK2 N1108S, JAK3 G62fsX47, JAK3 M511I, JAK3 P693L, JAK3 E698K, LCK L36fsX8, LCK F151S, LCK R484W, LMTK2 Q238P, LMTK2 A251T, LMTK2 G518V, LMTK2 D523Y, LMTK2 M758V, LMTK2 D793G, LMTK2 R828Q, LMTK2 L879M, LMTK2 A1008V, LYN F130V, MER E831Q, MET T171, MET P366S, MET S691L, NTRK1 P453fsX15, NTRK1 L585fsX73, NTRK1 G595E, NTRK1 R748W, NTRK2 A586V, NTRK2 V6221, NTRK2 A647fsX54, NTRK3 V530fsX6, NTRK3 G608D, NTRK3 A631fsX33, PDGFRA G79D, PTK-9 D258E, PTK-9 K265R, PTK-9 N333S, PYK2 S91, PYK2 C395Y, PYK2 E404Q, PYK2 D424Y, PYK2 E798Q, PYK2 M885L, PYK2 T978M, RET A750T, RON F574fsX23, RON Q955H, RON A1022_K1090del, RON V1070fsX12, ROR1 R185H, ROR1 R429Q, ROR1 S870I, ROR1 P883S, ROR2 R302H, ROR2 C389R, ROR2 D390fsX46, ROR2 P548S, ROS R187M, ROS D709fsX16, ROS Q865fsX90, ROS A1443S, RYK H250R, RYK R504H, RYK A559T, SYK M34fsX3, SYK I262L, SYK E315K, SYK A353T, SYK R520S, SYK V622A, TEC L89R, TEC W531R, TEC P587L, TEK A615T, TEK A1006T, TIE S470L, TIE M871T, TNK1 A299D, TYK2 A53T, TYK2 S340fsX26, TYK2 R701T, TYK2 D883N, TYK2 R901Q, TYK2 A928V, TYK2 P1104A, TYRO3 S324C, TYRO3 E489K, TYRO3 S531L, TYRO3 N788T, TYRO3 P822L, VEGFR1 G203W, VEGFR1 S437L, VEGFR1 A673V, VEGFR1 R781Q, VEGFR1 M938V, VEGFR2 E107K, VEGFR2 P1280S, YES1 K113Q, ZAP70 T155M, and ZAP70 M549V. The nucleic acid probe may include, consist essentially of or consist of a nucleotide base sequence that will hybridize to the mutated region of the nucleic acid sequence set forth in any of SEQ ID Nos: 257-512 or a functional derivative thereof.

[0040] In a seventh aspect, the present invention also features a nucleic acid probe for the detection of nucleic acid that encodes a kinase variant in a sample. The altered kinase polypeptide is one of AATYK (AATK), ACK1, AXL, CCK4, EPHA1, EPHA2, EPHA3, EPHB3, FAK, FES, HER2, LMTK2 (AATYK2/BREK), MATK, MER, NTRK3, PDGRFA, PDGFRB, PTK-9, PYK2, RON, ROS, RYK, TEK, TNK1, TXK, TYK2, VEGFR1, VEGFR2, VEGFR3, and ZAP70 comprising at least one of the alterations AATYK G600C, AATYK G641S, AATYK F1163S, AATYK T1227M, ACK1 P725L, AXL G517S, CCK4 P693L, CCK4 A777V, CCK4 S795R, EPHA1 S936L, EPHA2 R876H, EPHA3 I564V, EPHB3 R514Q, FAK L926delinsPWRL, FES P397R, FES S72_K129del, FES E413fsX131, HER2 R1161Q, LMTK2 S910I, MATK A496T, MER E823Q, NTRK3 E402_F410delinsV, NTRK3 G466_Y529delinsD, NTRK3 R711_V712ins16, PDGFRA L221F, PDGFRA S478P, PDGFRB T464M, PTK-9 E195_V196insRPEDHIG, PYK2 G414V, RON Q473_D515del, RON R627fsX23, RON R813_C814insQ, ROS C76fsX, RYK F516L, TEK V600L, TNK1 D472_R473del, TNK1 M598fsX5, TXK R63C, TXK Y414fsX15, TYK2 E971fsX67, VEGFR1 Y642H, VEGFR1 E982A, VEGFR1 P1201L, VEGFR2 C482R, VEGFR3 R1321Q and ZAP70 K186fsX. In some embodiments, the nucleic acid probe includes, consists essentially of or consists of a nucleotide base sequence that will hybridize to the mutated region of the nucleic acid sequence set forth in any of SEQ ID Nos: 643-646, 649, 654-655, 657-658, 663, 667-668, 673, 677-680, 692, 701-703, 713-717, 719-721, 728, 730-731, 737, 746, 750-751, 753-754, 756, 760, 762-764, 767, and 770-771, or a functional derivative thereof.

[0041] Methods for using the probes of the invention include detecting the presence or amount of mutated or altered kinase RNA in a sample by contacting the sample with a nucleic acid probe under conditions such that hybridization occurs and detecting the presence or amount of the probe bound to kinase RNA. The nucleic acid duplex formed between the probe and a nucleic acid sequence coding for a kinase polypeptide may be used in the identification of the sequence of the nucleic acid detected. In certain embodiment, kits for performing such methods may be constructed to include a container means having disposed therein a nucleic acid probe.

[0042] The present invention also relates to the use of a set of the mutant kinase polypeptides, the nucleic acids encoding the mutant kinase polypeptides, and the nucleic acid probes of the invention as molecular markers for the diagnosis of proliferative diseases or disorders in a subject. Such a method may also be useful to predict the risk of cancer with high predictive accuracy and/or to choose an adequate therapy. Moreover, such a method may also be useful to monitor the course of a treatment regimen and/or to predict the risk or cancer recurrence.

[0043] Thus, the present invention also encompasses a method that allows predicting or diagnosing proliferative diseases or disorders, such as cancer, in a subject comprising the steps of (a) obtaining a biological sample from the subject; and (b) detecting the expression of one or more nucleic acid molecules encoding the mutant kinase polypeptides of the invention in said sample.

[0044] In one embodiment of the invention, these two or more nucleic acid molecules the expression of which is to be detected includes, consist essentially of or consist of at least one of the nucleotide sequences set forth in SEQ ID Nos: 257-512, or complements and fragments thereof. Such a combination of two ore more of these molecular markers may be utilized for the risk prediction or diagnosis of cancer in a subject. Any combination of at least two of the above nucleic acid molecules may be used for this analysis. For example, in some embodiments, a combination of at least 2, 3, 4, 5, 6, 8, 10, 12, 14, 16, 18, 20, 25, 30, 40, 50, 60, 70, 80, 90 or more of the nucleotide sequences set forth in SEQ ID Nos: 257-512 may be used for said diagnostic purpose.

[0045] In another aspect, the invention is also directed to the use of a set of kinase variants, i.e. kinases that include germline alterations such as single nucleotide polymorphisms, the nucleic acids encoding these kinase variants, and nucleic acid probes for the nucleic acids encoding these kinase variants as molecular markers for the diagnosis of proliferative diseases or disorders in a subject. Such a method may also be useful to predict the risk of cancer development and/or metastasis with high predictive accuracy. Further, such method may also allow to choose an adequate therapy, monitor the course of a treatment regimen and/or to predict the risk or cancer recurrence.

[0046] Suitable kinase variants include, but are not limited to AATYK G600C, AATYK G641S, AATYK F1163S, AATYK T1227M, ABL1 P829L, ABL1 S991L, ACK1 P725L, ACK1 R1038H, ALK K1491R, ALK D1529E, ARG K959R, AXL G517S, CCK4 P693L, CCK4 E745D, CCK4 A777V, CCK4 S795R, CSF1R H362R, EGFR R521K, EPHA1 A160V, EPHA1 V900M, EPHA1 S936L, EPHA10 L629P, EPHA10 V6451, EPHA10 G749E, EPHA2 R876H, EPHA3 I564V, EPHA3 R914H, EPHA3 W924R, EPHA7 I138V, EPHB2 P128A, EPHB3 R514Q, EPHB4 P231S, EPHB6 G107S, EPHB6 S309A, FAK T416fsX, FAK L926delinsPWRL, FES P397R, FES S72_K129del, FES E413fsX131, FGFR1 V427_T428del, FGFR2 M71T, FGFR2H199_Q247del, FGFR3 T311_Q422del, FGFR4 V10I, FGFR4 L136P, FGFR4 G388R, FLT3 M227T, FRK G122R, FYN D506E, HER2 I655V, HER2 R1161Q, HER2 P1170A, HER3 S1119C, JAK2 L393V, JAK3 P132T, JAK3 P151R, JAK3 V722I, LMTK2 P30A, LMTK2 L780M, LMTK2 S910I, MATK A496T, MER E823Q, MER V870I, MET N375S, MET R988C, MET T1010I, MET V12381, NTRK1 H604Y, NTRK1 G613V, NTRK1 R780Q, NTRK2 D466fsX14, NTRK3 E402_F410delinsV, NTRK3 G466_Y529delinsD, NTRK3 R711_V712ins16, PDGFRA L221F, PDGFRA S478P, PDGFRB P345S, PDGFRB T464M, PTK-9 E195_V196insRPEDHIG, PYK2 G414V, PYK2 K838T, PYK2 V739_R780del, RET D489N, RET G691S, RET R982C, RON N440S, RON R523Q, RON Q473_D515del, RON R627fsX23, RON Y884_Q932del, RON R813_C814insQ, RON R1335G, ROR1 M518T, ROR2 T245A, ROR2 V819I, ROS T145P, ROS R167Q, ROS I537M, ROS S1109L, ROS D2213N, ROS K2228Q, ROS S2229C, ROS C76fsX, RYK N96S, RYK F516L, Styk G2045, TEK P346Q, TEK, V486I, TEK V600L, TNK1 D472_R473del, TNK1 M598V, TNK1 M598fsX5, TXK R63C, TXK R336Q, TXK Y414fsX15, TYK2 V362F, TYK2 G363S, TYK2 I684S, TYK2 E971fsX67, TYRO3 I346N, VEGFR1 Y642H, VEGFR1 E982A, VEGFR1 P1201L, VEGFR2 V297I, VEGFR2 Q472H, VEGFR2 C482R, VEGFR2 P1147S, VEGFR3 Q890H, VEGFR3 R1321Q, ZAP70 K186fsX, and ZAP70 P296_S301del

[0047] Thus, the present invention also encompasses a method that allows predicting or diagnosing proliferative diseases or disorders, such as cancer, in a subject. The method includes the steps of (a) obtaining a biological sample from the subject; and (b) detecting the expression of one or more nucleic acid molecules encoding the kinase variants of the invention in said sample.

[0048] In one embodiment of the invention, these one or more nucleic acid molecules the expression of which is to be detected include, consist essentially of or consist of at least one of the nucleotide sequences set forth in SEQ ID Nos: 643-772 or complements and fragments thereof. Such a combination of two or more of these molecular markers may be utilized for the risk prediction or diagnosis of cancer in a subject. Any combination of at least two of the above nucleic acid molecules may be used for this analysis. For example, in some embodiments, a combination of at least 5, 7, 10, 15, 20, 30, 40, 50, 60, 70, 80, 90 or all 91 of the nucleotide sequences set forth in SEQ ID Nos: 643-772 may be used for said diagnostic purpose.

[0049] In still another aspect, the invention provides a recombinant cell or tissue comprising a nucleic acid molecule encoding a kinase polypeptide selected from the group consisting of AATYK (AATK), ABL1, ACK1, ALK, ARG, AXL, BMX, BRK, BTK, CCK4, CSK, DDR1, DDR2, EGFR, EPHA2, EPHA3, EPHA4, EPHA5, EPHA6, EPHB1, EPHB2, EPHB3, EPHB4, EPHB6, FAK, FER, FES, FGFR1, FGFR2, FGFR4, FLT3, FRK, FYN, HER2, HER3, HER4, IGF1R, INSR, ITK, JAK1, JAK2, JAK3, LCK, LMTK2 (AATYK2/BREK), LYN, MER, MET, NTRK1, NTRK2, NTRK3, PDGRFA, PTK-9, PYK2, RET, RON, ROR1, ROR2, ROS, RYK, SYK, TEC, TEK, TIE, TNK1, TYK2, TYRO3, VEGFR1, VEGFR2, YES1, and ZAP70, including at least one of the mutations AATYK F1195C, ABL1 G417E, ABL1 N789S, ABL1 G883fsX12, ACK1 H37Y, ACK1 E111K, ACK1 R127H, ACK1 M393T, ACK1 A634T, ACK1 S699N, ACK1 P731L, ACK1 R748W, ACK1 G947D, ACK1 S985N, ALK G1580V, ARG E332K, ARG V345A, ARG K450R, ARG M657I, ARG P665T, ARG R668C, ARG Q696H, ARG K930R, ARG S968F, ARG Q994H, AXL M569I, AXL M589K, AXL G835V, BMX A150D, BMX S254del, BMX N267I, BRK W78fsX58, BTK M489I, BTK W588C, CCK4 D106N, CCK4 T410S, CCK4 M746L, CCK4 Q913H, CSK Q26X, DDR1 R60C, DDR1 V100A, DDR1 R248W, DDR2 M117I, DDR2 R478C, EGFR N115K, EGFR A289V, EGFR P332S, EGFR I646L, EGFR T678M, EGFR P753S, EGFR E922K, EGFR A1118T, EPHA2 R315Q, EPHA2 H333R, EPHA2 G391R, EPHA2 P460L, EPHA2 H609Y, EPHA2 M631T, EPHA2 G662S, EPHA2 V747I, EPHA2 L836R, EPHA2 E911K, EPHA2 V936M, EPHA2 R950 W, EPHA3 S46F, EPHA3 E53K, EPHA3 A777G, EPHA4 V234F, EPHA4 S803A, EPHA4 M877V, EPHA5 N81T, EPHA5 E85K, EPHA5 A672T, EPHA5 V891L, EPHA5 A957T, EPHA5 R981L, EPHA6 N291H, EPHA6 G513E, EPHA6 L622F, EPHB1 A39V, EPHB1 I837M, EPHB2 A83V, EPHB2 S98R, EPHB2 V136M, EPHB2 R270Q, EPHB2 P273L, EPHB2 R369Q, EPHB2 E686K, EPHB2 V762L, EPHB3 P6del, EPHB3 A517V, EPHB4 P231S, EPHB4 V547M, EPHB4 D576G, EPHB4 I610T, EPHB4 E890D, EPHB4 A955V, EPHB6 G353_E471del, EPHB6 A369T, EPHB6 L580F, EPHB6 E615K, EPHB6 A647V, EPHB6 S785R, EPHB6 R811C, FAK S329I, FAK Q440R, FAK A472V, FAK P901S, FER I240T, FER Q526L, FER Q599R, FES M323V, FES L690M, FES V724M, FGFR1 R78H, FGFR1 P252S, FGFR1 A268S, FGFR1 G539_K540del, FGFR21526T, FGFR4 Y367C, FLT3 V194M, FLT3 D358V, FLT3 V557I, FLT3 G757E, FLT3 R849H, FRK R64Q, FRK G119A, FRK R406H, FYN E521K, HER2 G518V, HER2 A830V, HER2 E930D, HER2 G1015E, HER2 A1216D, HER3 N126K, HER3 R611W, HER3 R667H, HER3 R1077W, HER3 R1089W, HER3 P1142H, HER3 L1177I, HER4 L753V, HER4 G936R, IGF1R T104M, IGF1R Y201H, IGF1R N209S, INSR L991I, ITK R448H, JAK1 I363V, JAK1 R494C, JAK1 N849fsX16, JAK2 F85S, JAK2 A377E, JAK2 L383P, JAK2 G571S, JAK2 E592K, JAK2 R1063H, JAK2 N1108S, JAK3 G62fsX47, JAK3 M511I, JAK3 P693L, JAK3 E698K, LCK L36fsX8, LCK F151S, LCK R484W, LMTK2 Q238P, LMTK2 A251T, LMTK2 G518V, LMTK2 D523Y, LMTK2 M758V, LMTK2 D793G, LMTK2 R828Q, LMTK2 L879M, LMTK2 A1008V, LYN F130V, MER E831Q, MET T171, MET P366S, MET S691L, NTRK1 P453fsX15, NTRK1 L585fsX73, NTRK1 G595E, NTRK1 R748W, NTRK2 A586V, NTRK2 V622I, NTRK2 A647fsX54, NTRK3 V530fsX6, NTRK3 G608D, NTRK3 A631fsX33, PDGFRA G79D, PTK-9 D258E, PTK-9 K265R, PTK-9 N333S, PYK2 S91, PYK2 C395Y, PYK2 E404Q, PYK2 D424Y, PYK2 E798Q, PYK2 M885L, PYK2 T978M, RET A750T, RON F574fsX23, RON Q955H, RON A1022_K1090del, RON V1070fsX12, ROR1 R185H, ROR1 R429Q, ROR1 S870I, ROR1 P883S, ROR2 R302H, ROR2 C389R, ROR2 D390fsX46, ROR2 P548S, ROS R187M, ROS D709fsX16, ROS Q865fsX90, ROS A1443S, RYK H250R, RYK R504H, RYK A559T, SYK M34fsX3, SYK I262L, SYK E315K, SYK A353T, SYK R520S, SYK V622A, TEC L89R, TEC W531R, TEC P587L, TEK A615T, TEK A1006T, TIE S470L, TIE M871T, TNK1 A299D, TYK2 A53T, TYK2 S340fsX26, TYK2 R701T, TYK2 D883N, TYK2 R901Q, TYK2 A928V, TYK2 P1104A, TYRO3 S324C, TYRO3 E489K, TYRO3 S531L, TYRO3 N788T, TYRO3 P822L, VEGFR1 G203W, VEGFR1 S437L, VEGFR1 A673V, VEGFR1 R781Q, VEGFR1 M938V, VEGFR2 E107K, VEGFR2P1280S, YES1 K113Q, ZAP70 T155M, and ZAP70 M549V. In such cells, the nucleic acid may be under the control of the genomic regulatory elements, or may be under the control of one or more heterologous regulatory elements including a heterologous promoter. In certain embodiments, the kinase polypeptide is a fragment of the protein encoded by the amino acid sequence set forth in SEQ ID Nos: 1-256, or the corresponding full-length amino acid sequence, wherein said fragment includes the mutated region.

[0050] Alternatively, the present invention provides a recombinant cell or tissue comprising a nucleic acid molecule encoding a kinase polypeptide selected from the group consisting of AATYK (AATK), ABL1, ACK1, ALK, ARG, AXL, CCK4, CSFR1, EGFR, EPHA1, EPHA10, EPHA2, EPHA3, EPHA7, EPHB2, EPHB3, EPHB4, EPHB6, FAK, FES, FGFR1, FGFR2, FGFR3, FGFR4, FLT3, FRK, FYN, HER2, HER3, JAK2, JAK3, LMTK2 (AATYK2/BREK), MATK, MER, MET, NTRK1, NTRK2, NTRK3, PDGRFA, PDGFRB, PTK-9, PYK2, RET, RON, ROR1, ROR2, ROS, RYK, STYK, TEK, TNK1, TXK, TYK2, TYRO3, VEGFR1, VEGFR2, VEGFR3 and ZAP70 including at least one of the alterations AATYK G600C, AATYK G641S, AATYK F1163S, AATYK T1227M, ABL1 P829L, ABL1 S991L, ACK1 P725L, ACK1 R1038H, ALK K1491R, ALK D1529E, ARG K959R, AXL G517S, CCK4 P693L, CCK4 E745D, CCK4 A777V, CCK4 S795R, CSF1R H362R, EGFR R521K, EPHA1 A160V, EPHA1 V900M, EPHA1 S936L, EPHA10 L629P, EPHA10 V645I, EPHA10 G749E, EPHA2 R876H, EPHA3 I564V, EPHA3 R914H, EPHA3 W924R, EPHA7 I138V, EPHB2 P128A, EPHB3 R514Q, EPHB4 P231S, EPHB6 G107S, EPHB6 S309A, FAK T416fsX, FAK L926delinsPWRL, FES P397R, FES S72_K129del, FES E413fsX131, FGFR1 V427_T428del, FGFR2 M71T, FGFR2H199_Q247del, FGFR3 T311_Q422del, FGFR4 V10I, FGFR4 L136P, FGFR4 G388R, FLT3 M227T, FRK G122R, FYN D506E, HER21655V, HER2 R1161Q, HER2 P1170A, HER3 S1119C, JAK2 L393V, JAK3 P132T, JAK3 P151R, JAK3 V722I, LMTK2 P30A, LMTK2 L780M, LMTK2 S9101, MATK A496T, MER E823Q, MER V870I, MET N375S, MET R988C, MET T1010I, MET V12381, NTRK1 H604Y, NTRK1 G613V, NTRK1 R780Q, NTRK2 D466fsX14, NTRK3 E402_F410delinsV, NTRK3 G466_Y529delinsD, NTRK3 R711_V712ins16, PDGFRA L221F, PDGFRA S478P, PDGFRB P345S, PDGFRB T464M, PTK-9 E195_V196insRPEDHIG, PYK2 G414V, PYK2 K838T, PYK2 V739_R780del, RET D489N, RET G691S, RET R982C, RON N440S, RON R523Q, RON Q473_D515del, RON R627fsX23, RON Y884_Q932del, RON R813_C814insQ, RON R1335G, ROR1 M518T, ROR2 T245A, ROR2 V819I, ROS T145P, ROS R167Q, ROS I537M, ROS S1109L, ROS D2213N, ROS K2228Q, ROS S2229C, ROS C76fsX, RYK N96S, RYK F516L, STYK G204S, TEK P346Q, TEK V486I, TEK V600L, TNK1 D472_R473del, TNK1 M598V, TNK1 M598fsX5, TXK R63C, TXK R336Q, TXK Y414fsX15, TYK2 V362F, TYK2 G363S, TYK2 I684S, TYK2 E971fsX67, TYRO3 I346N, VEGFR1 Y642H, VEGFR1 E982A, VEGFR1 P1201L, VEGFR2 V297I, VEGFR2 Q472H, VEGFR2 C482R, VEGFR2 P1147S, VEGFR3 Q890H, VEGFR3 R1321Q, ZAP70 K186fsX, and ZAP70 P296_S301del. In such cells, the nucleic acid may be under the control of the genomic regulatory elements, or may be under the control of one or more heterologous regulatory elements including a heterologous promoter. In certain embodiments, the kinase polypeptide is a fragment of the protein encoded by the amino acid sequence set forth in SEQ ID Nos: 513-642, or the corresponding full-length amino acid sequence, wherein said fragment includes the mutated region.

[0051] In still another aspect, the invention provides an isolated, enriched, or purified mutant kinase polypeptide selected from the group consisting of AATYK (AATK), ABL1, ACK1, ALK, ARG, AXL, BMX, BRK, BTK, CCK4, CSK, DDR1, DDR2, EGFR, EPHA2, EPHA3, EPHA4, EPHA5, EPHA6, EPHB1, EPHB2, EPHB3, EPHB4, EPHB6, FAK, FER, FES, FGFR1, FGFR2, FGFR4, FLT3, FRK, FYN, HER2, HER3, HER4, IGF1R, INSR, ITK, JAK1, JAK2, JAK3, LCK, LMTK2 (AATYK2/BREK), LYN, MER, MET, NTRK1, NTRK2, NTRK3, PDGRFA, PTK-9, PYK2, RET, RON, ROR1, ROR2, ROS, RYK, SYK, TEC, TEK, TIE, TNK1, TYK2, TYRO3, VEGFR1, VEGFR2, YES1, and ZAP70, including at least one of the mutations AATYK F1195C, ABL1 G417E, ABL1 N789S, ABL1 G883fsX12, ACK1 H37Y, ACK1 E111K, ACK1 R127H, ACK1 M393T, ACK1 A634T, ACK1 S699N, ACK1 P731L, ACK1 R748W, ACK1 G947D, ACK1 S985N, ALK G1580V, ARG E332K, ARG V345A, ARG K450R, ARG M657I, ARG P665T, ARG R668C, ARG Q696H, ARG K930R, ARG S968F, ARG Q994H, AXL M569I, AXL M589K, AXL G835V, BMX A150D, BMX S254del, BMX N267I, BRK W78fsX58, BTK M489I, BTK W588C, CCK4 D106N, CCK4 T410S, CCK4 M746L, CCK4 Q913H, CSK Q26X, DDR1 R60C, DDR1 V100A, DDR1 R248W, DDR2 M117I, DDR2 R478C, EGFR N115K, EGFR A289V, EGFR P332S, EGFR 1646L, EGFR T678M, EGFR P753S, EGFR E922K, EGFR A1118T, EPHA2 R315Q, EPHA2 H333R, EPHA2 G391R, EPHA2 P460L, EPHA2 H609Y, EPHA2 M631T, EPHA2 G662S, EPHA2 V747I, EPHA2 L836R, EPHA2 E911K, EPHA2 V936M, EPHA2 R950 W, EPHA3 S46F, EPHA3 E53K, EPHA3 A777G, EPHA4 V234F, EPHA4 S803A, EPHA4 M877V, EPHA5 N81T, EPHA5 E85K, EPHA5 A672T, EPHA5 V891L, EPHA5 A957T, EPHA5 R981L, EPHA6 N291H, EPHA6 G513E, EPHA6 L622F, EPHB1 A39V, EPHB1 I837M, EPHB2 A83V, EPHB2 S98R, EPHB2 V136M, EPHB2 R270Q, EPHB2 P273L, EPHB2 R369Q, EPHB2 E686K, EPHB2 V762L, EPHB3 P6del, EPHB3 A517V, EPHB4 P231S, EPHB4 V547M, EPHB4 D576G, EPHB4 I610T, EPHB4 E890D, EPHB4 A955V, EPHB6 G353_E471del, EPHB6 A369T, EPHB6 L580F, EPHB6 E615K, EPHB6 A647V, EPHB6 S785R, EPHB6 R811C, FAK S329I, FAK Q440R, FAK A472V, FAK P901 S, FER I240T, FER Q526L, FER Q599R, FES M323V, FES L690M, FES V724M, FGFR1 R78H, FGFR1 P252S, FGFR1 A268S, FGFR1 G539_K540del, FGFR21526T, FGFR4 Y367C, FLT3 V194M, FLT3 D358V, FLT3 V557I, FLT3 G757E, FLT3 R849H, FRK R64Q, FRK G119A, FRK R406H, FYN E521K, HER2 G518V, HER2 A830V, HER2 E930D, HER2 G1015E, HER2 A1216D, HER3 N126K, HER3 R611W, HER3 R667H, HER3 R1077W, HER3 R1089W, HER3 P1142H, HER3 L1177I, HER4 L753V, HER4 G936R, IGF1R T104M, IGF1R Y201H, IGF1R N209S, INSR L991I, ITK R448H, JAK1 I363V, JAK1 R494C, JAK1 N849fsX16, JAK2 F85S, JAK2 A377E, JAK2 L383P, JAK2 G571S, JAK2 E592K, JAK2 R1063H, JAK2 N1108S, JAK3 G62fsX47, JAK3 M511I, JAK3 P693L, JAK3 E698K, LCK L36fsX8, LCK F151S, LCK R484W, LMTK2 Q238P, LMTK2 A251T, LMTK2 G518V, LMTK2 D523Y, LMTK2 M758V, LMTK2 D793G, LMTK2 R828Q, LMTK2 L879M, LMTK2 A1008V, LYN F130V, MER E831Q, MET T171, MET P366S, MET S691L, NTRK1 P453fsX15, NTRK1 L585fsX73, NTRK1 G595E, NTRK1 R748W, NTRK2 A586V, NTRK2 V622I, NTRK2 A647fsX54, NTRK3 V530fsX6, NTRK3 G608D, NTRK3 A631fsX33, PDGFRA G79D, PTK-9 D258E, PTK-9 K265R, PTK-9 N333S, PYK2 S9I, PYK2 C395Y, PYK2 E404Q, PYK2 D424Y, PYK2 E798Q, PYK2 M885L, PYK2 T978M, RET A750T, RON F574fsX23, RON Q955H, RON A1022_K1090del, RON V1070fsX12, ROR1 R185H, ROR1 R429Q, ROR1 S870I, ROR1 P883S, ROR2 R302H, ROR2 C389R, ROR2 D390fsX46, ROR2 P548S, ROS R187M, ROS D709fsX16, ROS Q865fsX90, ROS A1443S, RYK H250R, RYK R504H, RYK A559T, SYK M34fsX3, SYK I262L, SYK E315K, SYK A353T, SYK R520S, SYK V622A, TEC L89R, TEC W531R, TEC P587L, TEK A615T, TEK A1006T, TIE S470L, TIE M871T, TNK1 A299D, TYK2 A53T, TYK2 S340fsX26, TYK2 R701T, TYK2 D883N, TYK2 R901Q, TYK2 A928V, TYK2 P1104A, TYRO3 S324C, TYRO3 E489K, TYRO3 S531L, TYRO3 N788T, TYRO3 P822L, VEGFR1 G203W, VEGFR1 S437L, VEGFR1 A673V, VEGFR1 R781Q, VEGFR1 M938V, VEGFR2 E107K, VEGFR2 P1280S, YES1 K113Q, ZAP70 T155M, and ZAP70 M549V.

[0052] In some embodiments, the mutant kinase polypeptide is a fragment of the protein with the amino acid sequence set forth in SEQ ID Nos: 1-256, or the corresponding full-length amino acid sequences, with the proviso that the mutation is included in said fragment. Also included are variants and isoforms of the mutant kinases of the invention.

[0053] The invention further provides an isolated, enriched, or purified kinase variant selected from the group consisting of AATYK (AATK), ACK1, AXL, CCK4, EPHA1, EPHA2, EPHA3, EPHB3, FAK, FES, HER2, LMTK2 (AATYK2/BREK), MATK, MER, NTRK3, PDGRFA, PDGFRB, PTK-9, PYK2, RON, ROS, RYK, TEK, TNK1, TXK, TYK2, VEGFR1, VEGFR2, VEGFR3, and ZAP70 including at least one of the alterations AATYK G600C, AATYK G641S, AATYK F1163S, AATYK T1227M, ACK1 P725L, AXL G517S, CCK4 P693L, CCK4 A777V, CCK4 S795R, EPHA1 S936L, EPHA2 R876H, EPHA3 I564V, EPHB3 R514Q, FAK L926delinsPWRL, FES P397R, FES S72_K129del, FES E413fsX131, HER2 R1161Q, LMTK2 S910I, MATK A496T, MER E823Q, NTRK3 E402_F410delinsV, NTRK3 G466_Y529delinsD, NTRK3 R711_V712ins16, PDGFRA L221F, PDGFRA S478P, PDGFRB T464M, PTK-9 E195_V196insRPEDHIG, PYK2 G414V, RON Q473_D515del, RON R627fsX23, RON R813_C814insQ, ROS C76fsX, RYK F516L, TEK V600L, TNK1 D472_R473del, TNK1 M598fsX5, TXK R63C, TXK Y414fsX15, TYK2 E971fsX67, VEGFR1 Y642H, VEGFR1 E982A, VEGFR1 P1201L, VEGFR2 C482R, VEGFR3 R1321Q and ZAP70 K186fsX.

[0054] In certain embodiments, the kinase variant is a fragment of the protein with the amino acid sequence set forth in SEQ ID Nos.: 513-516, 519, 524-525, 527-528, 533, 537-538, 543, 547-550, 562, 571-573, 583-587, 589-591, 598, 600-601, 607, 616, 620-621, 623-624, 626, 630, 632-634, 637, and 640-641, or the corresponding full-length amino acid sequences as well as isoforms thereof, with the proviso that the mutation is included in said fragment.

[0055] The polypeptide can be isolated from a natural source by methods well-known in the art. The natural source may be mammalian, for example, of murine, human, porcine, canine, or bovine origin. The polypeptide can be isolated from every suitable sample, including cultured cells, a biopsy, blood, semen, or any tissue derived from an organ, for example, skin, liver, pancreas to name only a few illustrative examples. In another embodiment the polypeptide may be synthesized using an automated polypeptide synthesizer.

[0056] In certain embodiments the invention includes the above mutant kinases and kinase variants, wherein the mutant kinases or kinase variants are of recombinant origin. For example, the mutant kinases and kinase variants of the invention may be expressed in a heterologous expression system.

[0057] In a further aspect, the invention provides an antibody (e.g., a monoclonal or polyclonal antibody) having specific binding affinity only for a mutant kinase polypeptide or a mutant kinase polypeptide domain or fragment, where the polypeptide is selected from the group consisting of AATYK (AATK), ABL1, ACK1, ALK, ARG, AXL, BMX, BRK, BTK, CCK4, CSK, DDR1, DDR2, EGFR, EPHA2, EPHA3, EPHA4, EPHA5, EPHA6, EPHB1, EPHB2, EPHB3, EPHB4, EPHB6, FAK, FER, FES, FGFR1, FGFR2, FGFR4, FLT3, FRK, FYN, HER2, HER3, HER4, IGF1R, INSR, ITK, JAK1, JAK2, JAK3, LCK, LMTK2 (AATYK2/BREK), LYN, MER, MET, NTRK1, NTRK2, NTRK3, PDGRFA, PTK-9, PYK2, RET, RON, ROR1, ROR2, ROS, RYK, SYK, TEC, TEK, TIE, TNK1, TYK2, TYRO3, VEGFR1, VEGFR2, YES1, and ZAP70, including at least one of the mutations AATYK F1195C, ABL1 G417E, ABL1 N789S, ABL1 G883fsX12, ACK1 H37Y, ACK1 E111K, ACK1 R127H, ACK1 M393T, ACK1 A634T, ACK1 S699N, ACK1 P731L, ACK1 R748W, ACK1 G947D, ACK1 S985N, ALK G1580V, ARG E332K, ARG V345A, ARG K450R, ARG M657I, ARG P665T, ARG R668C, ARG Q696H, ARG K930R, ARG S968F, ARG Q994H, AXL M569I, AXL M589K, AXL G835V, BMX A150D, BMX S254del, BMX N267I, BRK W78fsX58, BTK M489I, BTK W588C, CCK4 D106N, CCK4 T410S, CCK4 M746L, CCK4 Q913H, CSK Q26X, DDR1 R60C, DDR1 V100A, DDR1 R248W, DDR2M117I, DDR2 R478C, EGFR N115K, EGFR A289V, EGFR P332S, EGFR I646L, EGFR T678M, EGFR P753S, EGFR E922K, EGFR A1118T, EPHA2 R315Q, EPHA2 H333R, EPHA2 G391R, EPHA2 P460L, EPHA2 H609Y, EPHA2 M631T, EPHA2 G662S, EPHA2 V747I, EPHA2 L836R, EPHA2 E911K, EPHA2 V936M, EPHA2 R950 W, EPHA3 S46F, EPHA3 E53K, EPHA3 A777G, EPHA4 V234F, EPHA4 S803A, EPHA4 M877V, EPHA5 N81T, EPHA5 E85K, EPHA5 A672T, EPHA5 V891L, EPHA5 A957T, EPHA5 R981L, EPHA6 N291H, EPHA6 G513E, EPHA6 L622F, EPHB1 A39V, EPHB1 I837M, EPHB2 A83V, EPHB2 S98R, EPHB2 V136M, EPHB2 R270Q, EPHB2 P273L, EPHB2 R369Q, EPHB2 E686K, EPHB2 V762L, EPHB3 P6del, EPHB3 A517V, EPHB4 P231S, EPHB4 V547M, EPHB4 D576G, EPHB4 I610T, EPHB4 E890D, EPHB4 A955V, EPHB6 G353_E471del, EPHB6 A369T, EPHB6 L580F, EPHB6 E615K, EPHB6 A647V, EPHB6 S785R, EPHB6 R811C, FAK S329I, FAK Q440R, FAK A472V, FAK P901S, FER I240T, FER Q526L, FER Q599R, FES M323V, FES L690M, FES V724M, FGFR1 R78H, FGFR1 P252S, FGFR1 A268S, FGFR1 G539_K540del, FGFR2 I526T, FGFR4 Y367C, FLT3 V194M, FLT3 D358V, FLT3 V557I, FLT3 G757E, FLT3 R849H, FRK R64Q, FRK G119A, FRK R406H, FYN E521K, HER2 G518V, HER2 A830V, HER2 E930D, HER2 G1015E, HER2 A1216D, HER3 N126K, HER3 R611W, HER3 R667H, HER3 R1077W, HER3 R1089W, HER3 P1142H, HER3 L1177I, HER4 L753V, HER4 G936R, IGF1R T104M, IGF1R Y201H, IGF1R N209S, INSR L991I, ITK R448H, JAK1 I363V, JAK1 R494C, JAK1 N849fsX16, JAK2 F85S, JAK2 A377E, JAK2 L383P, JAK2 G571S, JAK2 E592K, JAK2 R1063H, JAK2 N1108S, JAK3 G62fsX47, JAK3 M511I, JAK3 P693L, JAK3 E698K, LCK L36fsX8, LCK F151S, LCK R484W, LMTK2 Q238P, LMTK2 A251T, LMTK2 G518V, LMTK2 D523Y, LMTK2 M758V, LMTK2 D793G, LMTK2 R828Q, LMTK2 L879M, LMTK2 A1008V, LYN F130V, MER E831Q, MET T171, MET P366S, MET S691L, NTRK1 P453fsX15, NTRK1 L585fsX73, NTRK1 G595E, NTRK1 R748W, NTRK2 A586V, NTRK2 V622I, NTRK2 A647fsX54, NTRK3 V530fsX6, NTRK3 G608D, NTRK3 A631fsX33, PDGFRA G79D, PTK-9 D258E, PTK-9 K265R, PTK-9 N333S, PYK2 S9I, PYK2 C395Y, PYK2 E404Q, PYK2 D424Y, PYK2 E798Q, PYK2 M885L, PYK2 T978M, RET A750T, RON F574fsX23, RON Q955H, RON A1022_K1090del, RON V1070fsX12, ROR1 R185H, ROR1 R429Q, ROR1 S870I, ROR1 P883S, ROR2 R302H, ROR2 C389R, ROR2 D390fsX46, ROR2 P548S, ROS R187M, ROS D709fsX16, ROS Q865fsX90, ROS A1443S, RYK H250R, RYK R504H, RYK A559T, SYK M34fsX3, SYK I262L, SYK E315K, SYK A353T, SYK R520S, SYK V622A, TEC L89R, TEC W531R, TEC P587L, TEK A615T, TEK A1006T, TIE S470L, TIE M871T, TNK1 A299D, TYK2 A53T, TYK2 S340fsX26, TYK2 R701T, TYK2 D883N, TYK2 R901Q, TYK2 A928V, TYK2 P1104A, TYRO3 S324C, TYRO3 E489K, TYRO3 S531L, TYRO3 N788T, TYRO3 P822L, VEGFR1 G203W, VEGFR1 S437L, VEGFR1 A673V, VEGFR1 R781Q, VEGFR1 M938V, VEGFR2 E107K, VEGFR2 P1280S, YES1 K113Q, ZAP70 T155M, and ZAP70 M549V.

[0058] Also included in the present invention are antibodies (e.g., monoclonal or polyclonal antibodies) having specific binding affinity only for a kinase variant or a kinase variant domain or fragment, where the polypeptide is selected from the group consisting of the or the group AATYK (AATK), ABL1, ACK1, ALK, ARG, AXL, CCK4, CSFR1, EGFR, EPHA1, EPHA10, EPHA2, EPHA3, EPHA7, EPHB2, EPHB3, EPHB4, EPHB6, FAK, FES, FGFR1, FGFR2, FGFR3, FGFR4, FLT3, FRK, FYN, HER2, HER3, JAK2, JAK3, LMTK2 (AATYK2/BREK), MATK, MER, MET, NTRK1, NTRK2, NTRK3, PDGRFA, PDGFRB, PTK-9, PYK2, RET, RON, ROR1, ROR2, ROS, RYK, STYK, TEK, TNK1, TXK, TYK2, TYRO3, VEGFR1, VEGFR2, VEGFR3 and ZAP70 including at least one of the alterations AATYK G600C, AATYK G641S, AATYK F1163S, AATYK T1227M, ABL1 P829L, ABL1 S991L, ACK1 P725L, ACK1 R1038H, ALK K1491R, ALK D1529E, ARG K959R, AXL G517S, CCK4 P693L, CCK4 E745D, CCK4 A777V, CCK4 S795R, CSF1R 14362R, EGFR R521K, EPHA1 A160V, EPHA1 V900M, EPHA1 S936L, EPHA10 L629P, EPHA10 V645I, EPHA10 G749E, EPHA2 R876H, EPHA3 I564V, EPHA3 R914H, EPHA3 W924R, EPHA7 I138V, EPHB2 P128A, EPHB3 R514Q, EPHB4 P231S, EPHB6 G107S, EPHB6 S309A, FAK T416fsX, FAK L926delinsPWRL, FES P397R, FES S72_K129del, FES E413fsX131, FGFR1 V427_T428del, FGFR2 M71T, FGFR2H199_Q247del, FGFR3 T311_Q422del, FGFR4 V10I, FGFR4 L136P, FGFR4 G388R, FLT3 M227T, FRK G122R, FYN D506E, HER21655V, HER2 R1161Q, HER2 P1170A, HER3 S1119C, JAK2 L393V, JAK3 P132T, JAK3 P151R, JAK3 V722I, LMTK2 P30A, LMTK2 L780M, LMTK2 S910I, MATK A496T, MER E823Q, MER V870I, MET N375S, MET R988C, MET T1010I, MET V12381, NTRK1 H604Y, NTRK1 G613V, NTRK1 R780Q, NTRK2 D466fsX14, NTRK3 E402_F410delinsV, NTRK3 G466_Y529delinsD, NTRK3 R711_V712ins16, PDGFRA L221F, PDGFRA S478P, PDGFRB P345S, PDGFRB T464M, PTK-9 E195_V196insRPEDHIG, PYK2 G414V, PYK2 K838T, PYK2 V739_R780del, RET D489N, RET G691S, RET R982C, RON N440S, RON R523Q, RON Q473_D515del, RON R627fsX23, RON Y884_Q932del, RON R813_C814insQ, RON R1335G, ROR1 M518T, ROR2 T245A, ROR2 V819I, ROS T145P, ROS R167Q, ROS I537M, ROS S1109L, ROS D2213N, ROS K2228Q, ROS S2229C, ROS C76fsX, RYK N96S, RYK F516L, STYK G204S, TEK P346Q, TEK V486I, TEK V600L, TNK1 D472_R473del, TNK1 M598V, TNK1 M598fsX5, TXK R63C, TXK R336Q, TXK Y414fsX15, TYK2 V362F, TYK2 G363S, TYK2 I684S, TYK2 E971fsX67, TYRO3 I346N, VEGFR1 Y642H, VEGFR1 E982A, VEGFR1 P1201L, VEGFR2 V297I, VEGFR2 Q472H, VEGFR2 C482R, VEGFR2 P1147S, VEGFR3 Q890H, VEGFR3 R1321Q, ZAP70 K186fsX, and ZAP70 P296_S301del.

[0059] Antibodies or antibody fragments having specific binding affinity only for a mutant kinase polypeptide or a kinase variant of the invention may be used in methods for detecting the presence and/or amount of mutant kinase polypeptide or kinase variant in a sample by probing the sample with the antibody under conditions suitable for kinase-antibody immuno-complex formation and detecting the presence and/or amount of the antibody conjugated to the kinase polypeptide. The antibodies of the invention are thus capable of differentiating between the mutant/variant and the native form of a kinase polypeptide.

[0060] Diagnostic kits for performing such methods may be constructed to include antibodies or antibody fragments specific for the kinase as well as a conjugate of a binding partner of the antibodies or the antibodies themselves. Diagnostic kits for performing such methods may be constructed to include a first container containing the antibody and a second container having a conjugate of a binding partner of the antibody and a label, such as, for example, a radioisotope. The diagnostic kit may also include notification of an FDA approved use and instructions therefor.

[0061] An antibody or antibody fragment with specific binding affinity only for a mutant kinase polypeptide or a kinase variant of the invention can be isolated, enriched, or purified from a prokaryotic or eukaryotic organism. Routine methods known to those skilled in the art enable production of antibodies or antibody fragments, in both prokaryotic and eukaryotic organisms. Purification, enrichment, and isolation of antibodies, which are polypeptide molecules, are described above.

[0062] In a further aspect, the invention relates to methods for identifying a compound that modulates kinase activity comprising: (a) contacting a kinase polypeptide selected from the group consisting of AATYK (AATK), ABL1, ACK1, ALK, ARG, AXL, BMX, BRK, BTK, CCK4, CSK, DDR1, DDR2, EGFR, EPHA2, EPHA3, EPHA4, EPHA5, EPHA6, EPHB1, EPHB2, EPHB3, EPHB4, EPHB6, FAK, FER, FES, FGFR1, FGFR2, FGFR4, FLT3, FRK, FYN, HER2, HER3, HER4, IGF1R, INSR, ITK, JAK1, JAK2, JAK3, LCK, LMTK2 (AATYK2/BREK), LYN, MER, MET, NTRK1, NTRK2, NTRK3, PDGRFA, PTK-9, PYK2, RET, RON, ROR1, ROR2, ROS, RYK, SYK, TEC, TEK, TIE, TNK1, TYK2, TYRO3, VEGFR1, VEGFR2, YES1, and ZAP70, including at least one of the mutations AATYK F1195C, ABL1 G417E, ABL1 N789S, ABL1 G883fsX12, ACK1 H37Y, ACK1 E111K, ACK1 R127H, ACK1 M393T, ACK1 A634T, ACK1 S699N, ACK1 P731L, ACK1 R748W, ACK1 G947D, ACK1 S985N, ALK G1580V, ARG E332K, ARG V345A, ARG K450R, ARG M657I, ARG P665T, ARG R668C, ARG Q696H, ARG K930R, ARG S968F, ARG Q994H, AXL M569I, AXL M589K, AXL G835V, BMX A150D, BMX S254del, BMX N267I, BRK W78fsX58, BTK M489I, BTK W588C, CCK4 D106N, CCK4 T410S, CCK4 M746L, CCK4 Q913H, CSK Q26X, DDR1 R60C, DDR1 V100A, DDR1 R248W, DDR2 M117I, DDR2 R478C, EGFR N115K, EGFR A289V, EGFR P332S, EGFR I646L, EGFR T678M, EGFR P753S, EGFR E922K, EGFR A1118T, EPHA2 R315Q, EPHA2 H333R, EPHA2 G391R, EPHA2 P460L, EPHA2 H609Y, EPHA2 M631T, EPHA2 G662S, EPHA2 V7471, EPHA2 L836R, EPHA2 E911K, EPHA2 V936M, EPHA2 R950 W, EPHA3 S46F, EPHA3 E53K, EPHA3 A777G, EPHA4 V234F, EPHA4 S803A, EPHA4 M877V, EPHA5 N81T, EPHA5 E85K, EPHA5 A672T, EPHA5 V891L, EPHA5 A957T, EPHA5 R981L, EPHA6 N291H, EPHA6 G513E, EPHA6 L622F, EPHB1 A39V, EPHB1 I837M, EPHB2 A83V, EPHB2 S98R, EPHB2 V136M, EPHB2 R270Q, EPHB2 P273L, EPHB2 R369Q, EPHB2 E686K, EPHB2 V762L, EPHB3 P6del, EPHB3 A517V, EPHB4 P231S, EPHB4 V547M, EPHB4 D576G, EPHB4 I610T, EPHB4 E890D, EPHB4 A955V, EPHB6 G353_E471del, EPHB6 A369T, EPHB6 L580F, EPHB6 E615K, EPHB6 A647V, EPHB6 S785R, EPHB6 R811C, FAK S3291, FAK Q440R, FAK A472V, FAK P901S, FER 1240T, FER Q526L, FER Q599R, FES M323V, FES L690M, FES V724M, FGFR1 R78H, FGFR1 P252S, FGFR1 A268S, FGFR1 G539_K540del, FGFR21526T, FGFR4Y367C, FLT3 V194M, FLT3 D358V, FLT3 V557I, FLT3 G757E, FLT3 R849H, FRK R64Q, FRK G119A, FRK R406H, FYN E521K, HER2 G518V, HER2 A830V, HER2 E930D, HER2 G1015E, HER2 A1216D, HER3 N126K, HER3 R611W, HER3 R667H, HER3 R1077W, HER3 R1089W, HER3 P1142H, HER3 L1177I, HER4 L753V, HER4 G936R, IGF1R T104M, IGF1R Y201H, IGF1R N209S, INSR L991I, ITK R448H, JAK1 I363V, JAK1 R494C, JAK1 N849fsX16, JAK2 F85S, JAK2 A377E, JAK2 L383P, JAK2 G571S, JAK2 E592K, JAK2 R1063H, JAK2 N1108S, JAK3 G62fsX47, JAK3 M511I, JAK3 P693L, JAK3 E698K, LCK L36fsX8, LCK F151S, LCK R484W, LMTK2 Q238P, LMTK2 A251T, LMTK2 G518V, LMTK2 D523Y, LMTK2 M758V, LMTK2 D793G, LMTK2 R828Q, LMTK2 L879M, LMTK2 A1008V, LYN F130V, MER E831Q, MET T17I, MET P366S, MET S691L, NTRK1 P453fsX15, NTRK1 L585fsX73, NTRK1 G595E, NTRK1 R748W, NTRK2 A586V, NTRK2 V6221, NTRK2 A647fsX54, NTRK3 V530fsX6, NTRK3 G608D, NTRK3 A631fsX33, PDGFRA G79D, PTK-9 D258E, PTK-9 K265R, PTK-9 N333S, PYK2 S9I, PYK2 C395Y, PYK2 E404Q, PYK2 D424Y, PYK2 E798Q, PYK2 M885L, PYK2 T978M, RET A750T, RON F574fsX23, RON Q955H, RON A1022_K1090del, RON V1070fsX12, ROR1 R185H, ROR1 R429Q, ROR1 S870I, ROR1 P883S, ROR2 R302H, ROR2 C389R, ROR2 D390fsX46, ROR2 P548S, ROS R187M, ROS D709fsX16, ROS Q865fsX90, ROS A1443S, RYK H250R, RYK R504H, RYK A559T, SYK M34fsX3, SYK I262L, SYK E315K, SYK A353T, SYK R520S, SYK V622A, TEC L89R, TEC W531R, TEC P587L, TEK A615T, TEK A1006T, TIE S470L, TIE M871T, TNK1 A299D, TYK2 A53T, TYK2 S340fsX26, TYK2 R701T, TYK2 D883N, TYK2 R901Q, TYK2 A928V, TYK2 P1104A, TYRO3 S324C, TYRO3 E489K, TYRO3 S531L, TYRO3 N788T, TYRO3 P822L, VEGFR1 G203W, VEGFR1 S437L, VEGFR1 A673V, VEGFR1 R781Q, VEGFR1 M938V, VEGFR2 E107K, VEGFR2 P1280S, YES1 K113Q, ZAP70 T155M, and ZAP70 M549V, with a test substance; (b) measuring the activity of said polypeptide; and (c) determining whether said substance modulates the activity of said polypeptide.

[0063] In addition to applying the above method to the mutant kinase polypeptides of the invention, such a method may also be suitable to test compounds for their activity for the kinase variants of the invention. These kinase variants include, but are not limited to AATYK (AATK), ABL1, ACK1, ALK, ARG, AXL, CCK4, CSFR1, EGFR, EPHA1, EPHA10, EPHA2, EPHA3, EPHA7, EPHB2, EPHB3, EPHB4, EPHB6, FAK, FES, FGFR1, FGFR2, FGFR3, FGFR4, FLT3, FRK, FYN, HER2, HER3, JAK2, JAK3, LMTK2 (AATYK2/BREK), MATK, MER, MET, NTRK1, NTRK2, NTRK3, PDGRFA, PDGFRB, PTK-9, PYK2, RET, RON, ROR1, ROR2, ROS, RYK, STYK, TEK, TNK1, TXK, TYK2, TYRO3, VEGFR1, VEGFR2, VEGFR3 and ZAP70. These kinases include at least one of the alterations AATYK G600C, AATYK G641S, AATYK F1163S, AATYK T1227M, ABL1 P829L, ABL1 S991L, ACK1 P725L, ACK1 R1038H, ALK K1491R, ALK D1529E, ARG K959R, AXL G517S, CCK4 P693L, CCK4 E745D, CCK4 A777V, CCK4 S795R, CSF1R H362R, EGFR R521K, EPHA1 A160V, EPHA1 V900M, EPHA1 S936L, EPHA10 L629P, EPHA10 V645I, EPHA10 G749E, EPHA2 R876H, EPHA3 I564V, EPHA3 R914H, EPHA3 W924R, EPHA7 I138V, EPHB2 P128A, EPHB3 R514Q, EPHB4 P231S, EPHB6 G107S, EPHB6 S309A, FAK T416fsX, FAK L926delinsPWRL, FES P397R, FES S72_K129del, FES E413fsX131, FGFR1 V427_T428del, FGFR2 M71T, FGFR2 H199_Q247del, FGFR3 T311_Q422del, FGFR4 V10I, FGFR4 L136P, FGFR4 G388R, FLT3 M227T, FRK G122R, FYN D506E, HER2 I655V, HER2 R1161Q, HER2 P1170A, HER3 S1119C, JAK2 L393V, JAK3 P132T, JAK3 P151R, JAK3 V722I, LMTK2 P30A, LMTK2 L780M, LMTK2 S910I, MATK A496T, MER E823Q, MER V870I, MET N375S, MET R988C, MET T1010I, MET V12381, NTRK1 H604Y, NTRK1 G613V, NTRK1 R780Q, NTRK2 D466fsX14, NTRK3 E402_F410delinsV, NTRK3 G466_Y529delinsD, NTRK3 R711_V712ins16, PDGFRA L221F, PDGFRA S478P, PDGFRB P345S, PDGFRB T464M, PTK-9 E195_V196insRPEDHIG, PYK2 G414V, PYK2 K838T, PYK2 V739_R780del, RET D489N, RET G691S, RET R982C, RON N440S, RON R523Q, RON Q473_D515del, RON R627fsX23, RON Y884_Q932del, RON R813_C814insQ, RON R1335G, ROR1 M518T, ROR2 T245A, ROR2 V819I, ROS T145P, ROS R167Q, ROS I537M, ROS S1109L, ROS D2213N, ROS K2228Q, ROS S2229C, ROS C76fsX, RYK N96S, RYK F516L, STYK G204S, TEK P346Q, TEK V486I, TEK V600L, TNK1 D472_R473del, TNK1 M598V, TNK1 M598fsX5, TXK R63C, TXK R336Q, TXK Y414fsX15, TYK2 V362F, TYK2 G363S, TYK2 I684S, TYK2 E971fsX67, TYRO3 I346N, VEGFR1 Y642H, VEGFR1 E982A, VEGFR1 P1201L, VEGFR2 V297I, VEGFR2 Q472H, VEGFR2 C482R, VEGFR2 P1147S, VEGFR3 Q890H, VEGFR3 R1321Q, ZAP70 K186fsX, and ZAP70 P296_S301del.

[0064] In another aspect, the invention refers to methods for identifying a substance that modulates kinase activity in a cell comprising the steps of: (a) expressing a kinase polypeptide in a cell, wherein said polypeptide is selected from the group consisting of AATYK (AATK), ABL1, ACK1, ALK, ARG, AXL, BMX, BRK, BTK, CCK4, CSK, DDR1, DDR2, EGFR, EPHA2, EPHA3, EPHA4, EPHA5, EPHA6, EPHB1, EPHB2, EPHB3, EPHB4, EPHB6, FAK, FER, FES, FGFR1, FGFR2, FGFR4, FLT3, FRK, FYN, HER2, HER3, HER4, IGF1R, INSR, ITK, JAK1, JAK2, JAK3, LCK, LMTK2 (AATYK2/BREK), LYN, MER, MET, NTRK1, NTRK2, NTRK3, PDGRFA, PTK-9, PYK2, RET, RON, ROR1, ROR2, ROS, RYK, SYK, TEC, TEK, TIE, TNK1, TYK2, TYRO3, VEGFR1, VEGFR2, YES1, and ZAP70, including at least one of the mutations AATYK F1195C, ABL1 G417E, ABL1 N789S, ABL1 G883fsX12, ACK1 H37Y, ACK1 E111K, ACK1 R127H, ACK1 M393T, ACK1 A634T, ACK1 S699N, ACK1 P731L, ACK1 R748W, ACK1 G947D, ACK1 S985N, ALK G1580V, ARG E332K, ARG V345A, ARG K450R, ARG M657I, ARG P665T, ARG R668C, ARG Q696H, ARG K930R, ARG S968F, ARG Q994H, AXL M569I, AXL M589K, AXL G835V, BMX A150D, BMX S254del, BMX N267I, BRK W78fsX58, BTK M489I, BTK W588C, CCK4 D106N, CCK4 T410S, CCK4 M746L, CCK4 Q913H, CSK Q26X, DDR1 R60C, DDR1 V100A, DDR1 R248W, DDR2 M117I, DDR2 R478C, EGFR N115K, EGFR A289V, EGFR P332S, EGFR I646L, EGFR T678M, EGFR P753S, EGFR E922K, EGFR A1118T, EPHA2 R315Q, EPHA2 H333R, EPHA2 G391R, EPHA2 P460L, EPHA2 H609Y, EPHA2 M631T, EPHA2 G662S, EPHA2 V747I, EPHA2 L836R, EPHA2 E911K, EPHA2 V936M, EPHA2 R950 W, EPHA3 S46F, EPHA3 E53K, EPHA3 A777G, EPHA4 V234F, EPHA4 S803A, EPHA4 M877V, EPHA5 N81T, EPHA5 E85K, EPHA5 A672T, EPHA5 V891L, EPHA5 A957T, EPHA5 R981L, EPHA6 N291H, EPHA6 G513E, EPHA6 L622F, EPHB1 A39V, EPHB1 I837M, EPHB2 A83V, EPHB2 S98R, EPHB2 V136M, EPHB2 R270Q, EPHB2 P273L, EPHB2 R369Q, EPHB2 E686K, EPHB2 V762L, EPHB3 P6del, EPHB3 A517V, EPHB4 P231S, EPHB4 V547M, EPHB4 D576G, EPHB4 I610T, EPHB4 E890D, EPHB4 A955V, EPHB6 G353_E471del, EPHB6 A369T, EPHB6 L580F, EPHB6 E615K, EPHB6 A647V, EPHB6 S785R, EPHB6 R811C, FAK S329I, FAK Q440R, FAK A472V, FAK P901S, FER I240T, FER Q526L, FER Q599R, FES M323V, FES L690M, FES V724M, FGFR1 R78H, FGFR1 P252S, FGFR1 A268S, FGFR1 G539_K540del, FGFR21526T, FGFR4 Y367C, FLT3 V194M, FLT3 D358V, FLT3 V557I, FLT3 G757E, FLT3 R849H, FRK R64Q, FRK G119A, FRK R406H, FYN E521K, HER2 G518V, HER2 A830V, HER2 E930D, HER2 G1015E, HER2 A1216D, HER3 N126K, HER3 R611W, HER3 R667H, HER3 R1077W, HER3 R1089W, HER3 P1142H, HER3 L1177I, HER4 L753V, HER4 G936R, IGF1R T104M, IGF1R Y201H, IGF1R N209S, INSR L991I, ITK R448H, JAK1 I363V, JAK1 R494C, JAK1 N849fsX16, JAK2 F85S, JAK2 A377E, JAK2 L383P, JAK2 G571S, JAK2 E592K, JAK2 R1063H, JAK2 N1108S, JAK3 G62fsX47, JAK3 M511I, JAK3 P693L, JAK3 E698K, LCK L36fsX8, LCK F151S, LCK R484W, LMTK2 Q238P, LMTK2 A251T, LMTK2 G518V, LMTK2 D523Y, LMTK2 M758V, LMTK2 D793G, LMTK2 R828Q, LMTK2 L879M, LMTK2 A1008V, LYN F130V, MER E831Q, MET T171, MET P366S, MET S691L, NTRK1 P453fsX15, NTRK1 L585fsX73, NTRK1 G595E, NTRK1 R748W, NTRK2 A586V, NTRK2 V622I, NTRK2 A647fsX54, NTRK3 V530fsX6, NTRK3 G608D, NTRK3 A631fsX33, PDGFRA G79D, PTK-9 D258E, PTK-9 K265R, PTK-9 N333S, PYK2 S91, PYK2 C395Y, PYK2 E404Q, PYK2 D424Y, PYK2 E798Q, PYK2 M885L, PYK2 T978M, RET A750T, RON F574fsX23, RON Q955H, RON A1022_K1090del, RON V1070fsX12, ROR1 R185H, ROR1 R429Q, ROR1 S870I, ROR1 P883S, ROR2 R302H, ROR2 C389R, ROR2 D390fsX46, ROR2 P548S, ROS R187M, ROS D709fsX16, ROS Q865fsX90, ROS A1443S, RYK H250R, RYK R504H, RYK A559T, SYK M34fsX3, SYK I262L, SYK E315K, SYK A353T, SYK R520S, SYK V622A, TEC L89R, TEC W531R, TEC P587L, TEK A615T, TEK A1006T, TIE S470L, TIE M871T, TNK1 A299D, TYK2 A53T, TYK2 S340fsX26, TYK2 R701T, TYK2 D883N, TYK2 R901Q, TYK2 A928V, TYK2 P1104A, TYRO3 S324C, TYRO3 E489K, TYRO3 S531L, TYRO3 N788T, TYRO3 P822L, VEGFR1 G203W, VEGFR1 S437L, VEGFR1 A673V, VEGFR1 R781Q, VEGFR1 M938V, VEGFR2 E107K, VEGFR2 P1280S, YES1 K113Q, ZAP70 T155M, and ZAP70 M549V, (b) adding a test substance to said cell; and (c) monitoring a change in cell phenotype or the interaction between said polypeptide and a natural binding partner.

[0065] Alternatively, kinase variants may be used in such a method, wherein the kinase variants include at least one of the alterations AATYK G600C, AATYK G641S, AATYK F1163S, AATYK T1227M, ABL1 P829L, ABL1 S991L, ACK1 P725L, ACK1 R1038H, ALK K1491R, ALK D1529E, ARG K959R, AXL G517S, CCK4 P693L, CCK4 E745D, CCK4 A777V, CCK4 S795R, CSF1R H362R, EGFR R521K, EPHA1 A160V, EPHA1 V900M, EPHA1 S936L, EPHA10 L629P, EPHA10 V645I, EPHA10 G749E, EPHA2 R876H, EPHA3 I564V, EPHA3 R914H, EPHA3 W924R, EPHA7 I138V, EPHB2 P128A, EPHB3 R514Q, EPHB4 P231S, EPHB6 G107S, EPHB6 S309A, FAK T416fsX, FAK L926delinsPWRL, FES P397R, FES S72_K129del, FES E413fsX131, FGFR1 V427_T428del, FGFR2 M71T, FGFR2H199_Q247del, FGFR3 T311_Q422del, FGFR4 V10I, FGFR4 L136P, FGFR4 G388R, FLT3 M227T, FRK G122R, FYN D506E, HER21655V, HER2 R1161Q, HER2 P1170A, HER3 S1119C, JAK2 L393V, JAK3 P132T, JAK3 P151R, JAK3 V722I, LMTK2 P30A, LMTK2 L780M, LMTK2 S910I, MATK A496T, MER E823Q, MER V870I, MET N375S, MET R988C, MET T1010I, MET V12381, NTRK1 H604Y, NTRK1 G613V, NTRK1 R780Q, NTRK2 D466fsX14, NTRK3 E402_F410delinsV, NTRK3 G466_Y529delinsD, NTRK3 R711_V712ins16, PDGFRA L221F, PDGFRA S478P, PDGFRB P345S, PDGFRB T464M, PTK-9 E195_V196insRPEDHIG, PYK2 G414V, PYK2 K838T, PYK2 V739_R780del, RET D489N, RET G691S, RET R982C, RON N440S, RON R523Q, RON Q473_D515del, RON R627fsX23, RON Y884_Q932del, RON R813_C814insQ, RON R1335G, ROR1 M518T, ROR2 T245A, ROR2 V819I, ROS T145P, ROS R167Q, ROS I537M, ROS S1109L, ROS D2213N, ROS K2228Q, ROS S2229C, ROS C76fsX, RYK N96S, RYK F516L, STYK G204S, TEK P346Q, TEK V486I, TEK V600L, TNK1 D472_R473del, TNK1 M598V, TNK1 M598fsX5, TXK R63C, TXK R336Q, TXK Y414fsX15, TYK2 V362F, TYK2 G363S, TYK2 I684S, TYK2 E971fsX67, TYRO3 I346N, VEGFR1 Y642H, VEGFR1 E982A, VEGFR1 P1201L, VEGFR2 V297I, VEGFR2 Q472H, VEGFR2 C482R, VEGFR2 P1147S, VEGFR3 Q890H, VEGFR3 R1321Q, ZAP70 K186fsX, and ZAP70 P296_S301del.

[0066] In yet another aspect, the invention provides methods for treating or preventing a proliferative disease or disorder by administering to a patient in need of such treatment a substance that modulates the activity of a mutant kinase selected from the group consisting of AATYK (AATK), ABL1, ACK1, ALK, ARG, AXL, BMX, BRK, BTK, CCK4, CSK, DDR1, DDR2, EGFR, EPHA2, EPHA3, EPHA4, EPHA5, EPHA6, EPHB1, EPHB2, EPHB3, EPHB4, EPHB6, FAK, FER, FES, FGFR1, FGFR2, FGFR4, FLT3, FRK, FYN, HER2, HER3, HER4, IGF1R, INSR, ITK, JAK1, JAK2, JAK3, LCK, LMTK2 (AATYK2/BREK), LYN, MER, MET, NTRK1, NTRK2, NTRK3, PDGRFA, PTK-9, PYK2, RET, RON, ROR1, ROR2, ROS, RYK, SYK, TEC, TEK, TIE, TNK1, TYK2, TYRO3, VEGFR1, VEGFR2, YES1, and ZAP70. The mutant kinase includes at least one of the mutations AATYK F1195C, ABL1 G417E, ABL1 N789S, ABL1 G883fsX12, ACK1 H37Y, ACK1 E111K, ACK1 R127H, ACK1 M393T, ACK1 A634T, ACK1 S699N, ACK1 P731L, ACK1 R748W, ACK1 G947D, ACK1 S985N, ALK G1580V, ARG E332K, ARG V345A, ARG K450R, ARG M657I, ARG P665T, ARG R668C, ARG Q696H, ARG K930R, ARG S968F, ARG Q994H, AXL M569I, AXL M589K, AXL G835V, BMX A150D, BMX S254del, BMX N267I, BRK W78fsX58, BTK M489I, BTK W588C, CCK4 D106N, CCK4 T410S, CCK4 M746L, CCK4 Q913H, CSK Q26X, DDR1 R60C, DDR1 V100A, DDR1 R248W, DDR2M117I, DDR2 R478C, EGFR N115K, EGFR A289V, EGFR P332S, EGFR I646L, EGFR T678M, EGFR P753S, EGFR E922K, EGFR A1118T, EPHA2 R315Q, EPHA2 H333R, EPHA2 G391R, EPHA2 P460L, EPHA2 H609Y, EPHA2 M631T, EPHA2 G662S, EPHA2 V747I, EPHA2 L836R, EPHA2 E911K, EPHA2 V936M, EPHA2 R950 W, EPHA3 S46F, EPHA3 E53K, EPHA3 A777G, EPHA4 V234F, EPHA4 S803A, EPHA4 M877V, EPHA5 N81T, EPHA5 E85K, EPHA5 A672T, EPHA5 V891L, EPHA5 A957T, EPHA5 R981L, EPHA6 N291H, EPHA6 G513E, EPHA6 L622F, EPHB1 A39V, EPHB1 I837M, EPHB2 A83V, EPHB2 S98R, EPHB2 V136M, EPHB2 R270Q, EPHB2 P273L, EPHB2 R369Q, EPHB2 E686K, EPHB2 V762L, EPHB3 P6del, EPHB3 A517V, EPHB4 P231S, EPHB4 V547M, EPHB4 D576G, EPHB4 I610T, EPHB4 E890D, EPHB4 A955V, EPHB6 G353_E471del, EPHB6 A369T, EPHB6 L580F, EPHB6 E615K, EPHB6 A647V, EPHB6 S785R, EPHB6 R811C, FAK S329I, FAK Q440R, FAK A472V, FAK P901S, FER I240T, FER Q526L, FER Q599R, FES M323V, FES L690M, FES V724M, FGFR1 R78H, FGFR1 P252S, FGFR1 A268S, FGFR1 G539_K540del, FGFR21526T, FGFR4 Y367C, FLT3 V194M, FLT3 D358V, FLT3 V557I, FLT3 G757E, FLT3 R849H, FRK R64Q, FRK G119A, FRK R406H, FYN E521K, HER2 G518V, HER2 A830V, HER2 E930D, HER2 G1015E, HER2 A1216D, HER3 N126K, HER3 R611W, HER3 R667H, HER3 R1077W, HER3 R1089W, HER3 P1142H, HER3 L1177I, HER4 L753V, HER4 G936R, IGF1R T104M, IGF1R Y201H, IGF1R N209S, INSR L991I, ITK R448H, JAK1 I363V, JAK1 R494C, JAK1 N849fsX16, JAK2 F85S, JAK2 A377E, JAK2 L383P, JAK2 G571S, JAK2 E592K, JAK2 R1063H, JAK2 N1108S, JAK3 G62fsX47, JAK3 M511I, JAK3 P693L, JAK3 E698K, LCK L36fsX8, LCK F151S, LCK R484W, LMTK2 Q238P, LMTK2 A251T, LMTK2 G518V, LMTK2 D523Y, LMTK2 M758V, LMTK2 D793G, LMTK2 R828Q, LMTK2 L879M, LMTK2 A1008V, LYN F130V, MER E831Q, MET T171, MET P366S, MET S691L, NTRK1 P453fsX15, NTRK1 L585fsX73, NTRK1 G595E, NTRK1 R748W, NTRK2 A586V, NTRK2 V622I, NTRK2 A647fsX54, NTRK3 V530fsX6, NTRK3 G608D, NTRK3 A631fsX33, PDGFRA G79D, PTK-9 D258E, PTK-9 K265R, PTK-9 N333S, PYK2 S9I, PYK2 C395Y, PYK2 E404Q, PYK2 D424Y, PYK2 E798Q, PYK2 M885L, PYK2 T978M, RET A750T, RON F574fsX23, RON Q955H, RON A1022_K1090del, RON V1070fsX12, ROR1 R185H, ROR1 R429Q, ROR1 S870I, ROR1 P883S, ROR2 R302H, ROR2 C389R, ROR2 D390fsX46, ROR2 P548S, ROS R187M, ROS D709fsX16, ROS Q865fsX90, ROS A1443S, RYK H250R, RYK R504H, RYK A559T, SYK M34fsX3, SYK I262L, SYK E315K, SYK A353T, SYK R520S, SYK V622A, TEC L89R, TEC W531R, TEC P587L, TEK A615T, TEK A1006T, TIE S470L, TIE M871T, TNK1 A299D, TYK2 A53T, TYK2 S340fsX26, TYK2 R701T, TYK2 D883N, TYK2 R901Q, TYK2 A928V, TYK2 P1104A, TYRO3 S324C, TYRO3 E489K, TYRO3 S531L, TYRO3 N788T, TYRO3 P822L, VEGFR1 G203W, VEGFR1 S437L, VEGFR1 A673V, VEGFR1 R781Q, VEGFR1 M938V, VEGFR2 E107K, VEGFR2 P1280S, YES1 K113Q, ZAP70 T155M, and ZAP70 M549V. In some embodiments the disease is cancer.

[0067] In another embodiment, the method for treating or preventing a proliferative disease or disorder includes administering to a patient in need of such treatment a substance that modulates the activity of a kinase variant associated with such a disease or disorder, the kinase variant being selected from the group consisting of AATYK (AATK), ABL1, ACK1, ALK, ARG, AXL, CCK4, CSFR1, EGFR, EPHA1, EPHA10, EPHA2, EPHA3, EPHA7, EPHB2, EPHB3, EPHB4, EPHB6, FAK, FES, FGFR1, FGFR2, FGFR3, FGFR4, FLT3, FRK, FYN, HER2, HER3, JAK2, JAK3, LMTK2 (AATYK2/BREK), MATK, MER, MET, NTRK1, NTRK2, NTRK3, PDGRFA, PDGFRB, PTK-9, PYK2, RET, RON, ROR1, ROR2, ROS, RYK, STYK, TEK, TNK1, TXK, TYK2, TYRO3, VEGFR1, VEGFR2, VEGFR3 and ZAP70. These kinases include at least one of the alterations AATYK G600C, AATYK G641S, AATYK F1163S, AATYK T1227M, ABL1 P829L, ABL1 S991L, ACK1 P725L, ACK1 R1038H, ALK K1491R, ALK D1529E, ARG K959R, AXL G517S, CCK4 P693L, CCK4 E745D, CCK4 A777V, CCK4 S795R, CSF1R H362R, EGFR R521K, EPHA1 A160V, EPHA1 V900M, EPHA1 S936L, EPHA10 L629P, EPHA10 V645I, EPHA10 G749E, EPHA2 R876H, EPHA3 I564V, EPHA3 R914H, EPHA3 W924R, EPHA7 I138V, EPHB2 P128A, EPHB3 R514Q, EPHB4 P231S, EPHB6 G107S, EPHB6 S309A, FAK T416fsX, FAK L926delinsPWRL, FES P397R, FES S72_K129del, FES E413fsX131, FGFR1 V427_T428del, FGFR2M71T, FGFR2H199_Q247del, FGFR3 T311_Q422del, FGFR4 V10I, FGFR4 L136P, FGFR4 G388R, FLT3 M227T, FRK G122R, FYN D506E, HER2 I655V, HER2 R1161Q, HER2 P1170A, HER3 S1119C, JAK2 L393V, JAK3 P132T, JAK3 P151R, JAK3 V722I, LMTK2 P30A, LMTK2 L780M, LMTK2 S910I, MATK A496T, MER E823Q, MER V8701, MET N375S, MET R988C, MET T1010I, MET V12381, NTRK1 H604Y, NTRK1 G613V, NTRK1 R780Q, NTRK2 D466fsX14, NTRK3 E402_F410delinsV, NTRK3 G466_Y529delinsD, NTRK3 R711_V712ins16, PDGFRA L221F, PDGFRA S478P, PDGFRB P345S, PDGFRB T464M, PTK-9 E195_V196insRPEDHIG, PYK2 G414V, PYK2 K838T, PYK2 V739_R780del, RET D489N, RET G691S, RET R982C, RON N440S, RON R523Q, RON Q473_D515del, RON R627fsX23, RON Y884_Q932del, RON R813_C814insQ, RON R1335G, ROR1 M518T, ROR2 T245A, ROR2 V819I, ROS T145P, ROS R167Q, ROS I537M, ROS S1109L, ROS D2213N, ROS K2228Q, ROS S2229C, ROS C76fsX, RYK N96S, RYK F516L, STYK G204S, TEK P346Q, TEK V4861, TEK V600L, TNK1 D472_R473del, TNK1 M598V, TNK1 M598fsX5, TXK R63C, TXK R336Q, TXK Y414fsX15, TYK2 V362F, TYK2 G363S, TYK2 I684S, TYK2 E971fsX67, TYRO3 I346N, VEGFR1 Y642H, VEGFR1 E982A, VEGFR1 P1201L, VEGFR2 V297I, VEGFR2 Q472H, VEGFR2 C482R, VEGFR2 P1147S, VEGFR3 Q890H, VEGFR3 R1321Q, ZAP70 K186fsX, and ZAP70 P296_S301del.

[0068] The present invention also provides a method for screening for human cells containing a mutant kinase polypeptide of the invention or an equivalent sequence. The method involves identifying the mutant polypeptide in human cells using techniques that are routine and standard in the art, such as those described herein for identifying the mutant kinases of the invention (e.g., cloning, Southern or Northern blot analysis, in situ hybridization, PCR amplification, etc.).

[0069] Thus, in a further aspect, the invention encompasses methods for the detection of a nucleic acid encoding a mutant kinase polypeptide or a kinase variant in a sample as a diagnostic tool for diseases or disorders, wherein the method includes the steps of (a) contacting the sample with a nucleic acid probe which hybridizes under hybridization assay conditions to

[0070] (i) a nucleic acid target region of a mutant kinase polypeptide selected from the group consisting of AATYK (AATK), ABL1, ACK1, ALK, ARG, AXL, BMX, BRK, BTK, CCK4, CSK, DDR1, DDR2, EGFR, EPHA2, EPHA3, EPHA4, EPHA5, EPHA6, EPHB1, EPHB2, EPHB3, EPHB4, EPHB6, FAK, FER, FES, FGFR1, FGFR2, FGFR4, FLT3, FRK, FYN, HER2, HER3, HER4, IGF1R, INSR, ITK, JAK1, JAK2, JAK3, LCK, LMTK2 (AATYK2/BREK), LYN, MER, MET, NTRK1, NTRK2, NTRK3, PDGRFA, PTK-9, PYK2, RET, RON, ROR1, ROR2, ROS, RYK, SYK, TEC, TEK, TIE, TNK1, TYK2, TYRO3, VEGFR1, VEGFR2, YES1, and ZAP70, with these mutant kinases including at least one of the mutations AATYK F1195C, ABL1 G417E, ABL1 N789S, ABL1 G883fsX12, ACK1 H37Y, ACK1 E111K, ACK1 R127H, ACK1 M393T, ACK1 A634T, ACK1 S699N, ACK1 P731L, ACK1 R748W, ACK1 G947D, ACK1 S985N, ALK G1580V, ARG E332K, ARG V345A, ARG K450R, ARG M6571, ARG P665T, ARG R668C, ARG Q696H, ARG K930R, ARG S968F, ARG Q994H, AXL M569I, AXL M589K, AXL G835V, BMX A150D, BMX S254del, BMX N267I, BRK W78fsX58, BTK M489I, BTK W588C, CCK4 D106N, CCK4 T410S, CCK4 M746L, CCK4 Q913H, CSK Q26X, DDR1 R60C, DDR1 V100A, DDR1 R248W, DDR2 M117I, DDR2 R478C, EGFR N115K, EGFR A289V, EGFR P332S, EGFR I646L, EGFR T678M, EGFR P753S, EGFR E922K, EGFR A1118T, EPHA2 R315Q, EPHA2 H333R, EPHA2 G391R, EPHA2 P460L, EPHA2 H609Y, EPHA2 M631T, EPHA2 G662S, EPHA2 V747I, EPHA2 L836R, EPHA2 E911K, EPHA2 V936M, EPHA2 R950 W, EPHA3 S46F, EPHA3 E53K, EPHA3 A777G, EPHA4 V234F, EPHA4 S803A, EPHA4 M877V, EPHA5 N81T, EPHA5 E85K, EPHA5 A672T, EPHA5 V891L, EPHA5 A957T, EPHA5 R981L, EPHA6 N291H, EPHA6 G513E, EPHA6 L622F, EPHB1 A39V, EPHB1 I837M, EPHB2 A83V, EPHB2 S98R, EPHB2 V136M, EPHB2 R270Q, EPHB2 P273L, EPHB2 R369Q, EPHB2 E686K, EPHB2 V762L, EPHB3 P6del, EPHB3 A517V, EPHB4 P231S, EPHB4 V547M, EPHB4 D576G, EPHB4 I610T, EPHB4 E890D, EPHB4 A955V, EPHB6 G353_E471del, EPHB6 A369T, EPHB6 L580F, EPHB6 E615K, EPHB6 A647V, EPHB6 S785R, EPHB6 R811C, FAK S329I, FAK Q440R, FAK A472V, FAK P901S, FER I240T, FER Q526L, FER Q599R, FES M323V, FES L690M, FES V724M, FGFR1 R78H, FGFR1 P252S, FGFR1 A268S, FGFR1 G539_K540del, FGFR2 I526T, FGFR4 Y367C, FLT3 V194M, FLT3 D358V, FLT3 V557I, FLT3 G757E, FLT3 R849H, FRK R64Q, FRK G119A, FRK R406H, FYN E521K, HER2 G518V, HER2 A830V, HER2 E930D, HER2 G1015E, HER2 A1216D, HER3 N126K, HER3 R611W, HER3 R667H, HER3 R1077W, HER3 R1089W, HER3 P1142H, HER3 L1177I, HER4 L753V, HER4 G936R, IGF1R T104M, IGF1R Y201H, IGF1R N209S, INSR L991I, ITK R448H, JAK1 I363V, JAK1 R494C, JAK1 N849fsX16, JAK2 F85S, JAK2 A377E, JAK2 L383P, JAK2 G571S, JAK2 E592K, JAK2 R1063H, JAK2 N1108S, JAK3 G62fsX47, JAK3 M511I, JAK3 P693L, JAK3 E698K, LCK L36fsX8, LCK F151S, LCK R484W, LMTK2 Q238P, LMTK2 A251T, LMTK2 G518V, LMTK2 D523Y, LMTK2 M758V, LMTK2 D793G, LMTK2 R828Q, LMTK2 L879M, LMTK2 A1008V, LYN F130V, MER E831Q, MET T17I, MET P366S, MET S691L, NTRK1 P453fsX15, NTRK1 L585fsX73, NTRK1 G595E, NTRK1 R748W, NTRK2 A586V, NTRK2 V622I, NTRK2 A647fsX54, NTRK3 V530fsX6, NTRK3 G608D, NTRK3 A631fsX33, PDGFRA G79D, PTK-9 D258E, PTK-9 K265R, PTK-9 N333S, PYK2 S91, PYK2 C395Y, PYK2 E404Q, PYK2 D424Y, PYK2 E798Q, PYK2 M885L, PYK2 T978M, RET A750T, RON F574fsX23, RON Q955H, RON A1022_K1090del, RON V1070fsX12, ROR1 R185H, ROR1 R429Q, ROR1 S870I, ROR1 P883S, ROR2 R302H, ROR2C389R, ROR2 D390fsX46, ROR2 P548S, ROS R187M, ROS D709fsX16, ROS Q865fsX90, ROS A1443S, RYK H250R, RYK R504H, RYK A559T, SYK M34fsX3, SYK I262L, SYK E315K, SYK A353T, SYK R520S, SYK V622A, TEC L89R, TEC W531R, TEC P587L, TEK A615T, TEK A1006T, TIE S470L, TIE M871T, TNK1 A299D, TYK2 A53T, TYK2 S340fsX26, TYK2 R701T, TYK2 D883N, TYK2 R901Q, TYK2 A928V, TYK2 P1104A, TYRO3 S324C, TYRO3 E489K, TYRO3 S531L, TYRO3 N788T, TYRO3 P822L, VEGFR1 G203W, VEGFR1 S437L, VEGFR1 A673V, VEGFR1 R781Q, VEGFR1 M938V, VEGFR2 E107K, VEGFR2 P1280S, YES1 K113Q, ZAP70 T155M, and ZAP70 M549V; or

[0071] (ii) a nucleic acid target region of a kinase variant selected from the group consisting of AATYK (AATK), ABL1, ACK1, ALK, ARG, AXL, CCK4, CSFR1, EGFR, EPHA1, EPHA10, EPHA2, EPHA3, EPHA7, EPHB2, EPHB3, EPHB4, EPHB6, FAK, FES, FGFR1, FGFR2, FGFR3, FGFR4, FLT3, FRK, FYN, HER2, HER3, JAK2, JAK3, LMTK2 (AATYK2/BREK), MATK, MER, MET, NTRK1, NTRK2, NTRK3, PDGRFA, PDGFRB, PTK-9, PYK2, RET, RON, ROR1, ROR2, ROS, RYK, STYK, TEK, TNK1, TXK, TYK2, TYRO3, VEGFR1, VEGFR2, VEGFR3 and ZAP70, with these kinases including at least one of the alterations AATYK G600C, AATYK G641S, AATYK F1163S, AATYK T1227M, ABL1 P829L, ABL1 S991L, ACK1 P725L, ACK1 R1038H, ALK K1491R, ALK D1529E, ARG K959R, AXL G517S, CCK4 P693L, CCK4 E745D, CCK4 A777V, CCK4 S795R, CSF1R H362R, EGFR R521K, EPHA1 A160V, EPHA1 V900M, EPHA1 S936L, EPHA10 L629P, EPHA10 V645I, EPHA10 G749E, EPHA2 R876H, EPHA3 I564V, EPHA3 R914H, EPHA3 W924R, EPHA7 I138V, EPHB2 P128A, EPHB3 R514Q, EPHB4 P231S, EPHB6 G107S, EPHB6 S309A, FAK T416fsX, FAK L926delinsPWRL, FES P397R, FES S72_K129del, FES E413fsX131, FGFR1 V427_T428del, FGFR2 M71T, FGFR2H199_Q247del, FGFR3 T311_Q422del, FGFR4 V10I, FGFR4 L136P, FGFR4 G388R, FLT3 M227T, FRK G122R, FYN D506E, HER21655V, HER2 R1161Q, HER2 P1170A, HER3 S1119C, JAK2 L393V, JAK3 P132T, JAK3 P151R, JAK3 V722I, LMTK2 P30A, LMTK2 L780M, LMTK2 S910I, MATK A496T, MER E823Q, MER V870I, MET N375S, MET R988C, MET T1010I, MET V1238I, NTRK1 H604Y, NTRK1 G613V, NTRK1 R780Q, NTRK2 D466fsX14, NTRK3 E402_F410delinsV, NTRK3 G466_Y529delinsD, NTRK3 R711_V712ins16, PDGFRA L221F, PDGFRA S478P, PDGFRB P345S, PDGFRB T464M, PTK-9 E195_V196insRPEDHIG, PYK2 G414V, PYK2 K838T, PYK2 V739_R780del, RET D489N, RET G691S, RET R982C, RON N440S, RON R523Q, RON Q473_D515del, RON R627fsX23, RON Y884_Q932del, RON R813_C814insQ, RON R1335G, ROR1 M518T, ROR2 T245A, ROR2 V819I, ROS T145P, ROS R167Q, ROS I537M, ROS S1109L, ROS D2213N, ROS K2228Q, ROS S2229C, ROS C76fsX, RYK N96S, RYK F516L, STYK G204S, TEK P346Q, TEK V486I, TEK V600L, TNK1 D472_R473del, TNK1 M598V, TNK1 M598fsX5, TXK R63C, TXK R336Q, TXK Y414fsX15, TYK2 V362F, TYK2 G363S, TYK2 I684S, TYK2 E971fsX67, TYRO3 I346N, VEGFR1 Y642H, VEGFR1 E982A, VEGFR1 P1201L, VEGFR2 V297I, VEGFR2 Q472H, VEGFR2 C482R, VEGFR2 P1147S, VEGFR3 Q890H, VEGFR3 R1321Q, ZAP70 K186fsX, and ZAP70 P296_S301del. The probe includes the nucleic acid sequence that encodes the mutant kinase polypeptide or the kinase variant, fragments thereof, or the complements of the sequences and fragments; and (b) detecting the presence or amount of the probe: target region hybrid as an indication of the disease.

[0072] In certain embodiments of the invention, the disease or disorder is a proliferative disease or disorder, for example, cancer.

[0073] In certain embodiments the nucleic acid probes of the invention hybridizes to a kinase target region encoding at least 6, 12, 75, 90, 105, 120, 150, 200, 250, 300 or 350 contiguous amino acids of the sequence set forth in SEQ ID Nos: 1-256 and 513-642, or the corresponding full-length amino acid sequence, or a functional derivative thereof, with the proviso that the mutated region is included. Hybridization conditions should be such that hybridization occurs only with the kinase genes in the presence of other nucleic acid molecules. Under stringent hybridization conditions only highly complementary nucleic acid sequences hybridize. Typically, such conditions prevent hybridization of nucleic acids having one or more mismatches in 20 contiguous nucleotides.

[0074] The diseases that could be diagnosed by detection of mutated or altered kinase nucleic acid in a sample may include cancers. The test samples suitable for nucleic acid probing methods of the present invention include, for example, cells or nucleic acid extracts of cells, or biological fluids. The samples used in the above-described methods will vary based on the assay format, the detection method and the nature of the tissues, cells or extracts to be assayed. Methods for preparing nucleic acid extracts of cells are well-known in the art and can be readily adapted in order to obtain a sample that is compatible with the method utilized.

[0075] The summary of the invention described above is not limiting and other features and advantages of the invention will be apparent from the following detailed description of the invention, and from the claims.

### BRIEF DESCRIPTION OF THE DRAWINGS

[0076] The invention will be better understood with reference to the detailed description when considered in conjunction with the non-limiting examples and the accompanying drawings, in which:

[0077] FIG. 1A shows the origin of tissue samples and number of tumor cell lines derived thereof, FIG. 1B patterns of genetic alterations for 5 skin-derived tumor cell lines and FIG. 1C the number of somatic (bright) or germline (dark) alterations in the characterization of the tyrosine kinase transcriptome of tumor cell lines.

[0078] FIG. 2 illustrates the genetic alterations of the FGFR4 gene detected in tumor cell lines and control samples.

[0079] FIG. 3A depicts the rates of germline alterations of non-synonymous polymorphisms identified in the TKT of 276 cancer cell lines and control samples (MS=missense substitution, NS=nonsense substitution, DEL=deletion, INS=insertions). FIG. 3B shows the domain localization of identified polymorphisms. FIG. 3C depicts the tissue distribution of germline variations (BL=bladder; BS=bone and soft tissue; BA=brain; BE=breast; CV=cervix and vulva; CO=colon; EP=endometrium and placenta; HN=head and neck; HL=hematopoietic and lymphoid system; KI=kidney; LI=liver; LU=lung; OV=ovary; PA=pancreas; PR=prostate; SK=skin; ST=stomach; TE=testes; TY=thyroid, NO=normal control samples).

[0080] FIG. 4 depicts the diverging occurrence rates of polymorphisms in different tumor types and/or control samples. The frequency of homozygous (HO; dark bar) and heterozygous (HE; light bar) carriers of (A) EGFR R521K, (B) TYK2 V362F and (C) TNK1 M598delinsEVRSHX was determined. Only tissue origins (for abbreviations see legend to FIG. 1, supra) with an expression of the corresponding gene in at least 10 samples have been selected for this analysis.

[0081] FIG. 5 depicts the distributions of non-synonymous somatic mutations identified in all transcribed PTK genes from 254 tumor cell lines. A, rates of somatic mutations. The allocation to missense (MS) or nonsense (NS) substitutions, deletions (DEL) and insertions (INS) as well as frequency categories (1, 2-5, 6-10 or more than 10 affected samples) is shown. B, domain localization of identified mutations. The localization within defined domains or other protein regions is indicated. C, tissue distribution of sporadic alterations. For each somatic mutation, the tissue distribution (see legend to FIG. 3 for abbreviations) was determined (FIG. 35) and presented here for text-related examples. Paired numerals indicate the number of mutated and expression-positive cell lines within a given tumor type. Novel somatic mutations are highlighted in bold type.

[0082] FIG. 6 is an illustration of known and novel genetic alterations in selected genes. A, SYK. The domain organization and location of genetic alterations is displayed. B, sequence comparison of FGFR1-4. For FGFR1-4, the general domain organization (middle) and sequence comparisons of the linker region connecting the IG-D2- and IG-D3-domain (top) as well as a part of the extracellular juxtamembrane region (bottom) are illustrated. Genetic alterations identified in the cell line screen are illustrated below, known sequence variants are depicted above the graphical representation of the domain structure. Polymorphisms are underlined and somatic mutations are not highlighted. Numbers in parenthesis indicate the number of affected non-related cell lines. (SH2: Src Homolgy 2 Domain; TK: Tyrosine Kinase Domain; S: Signal Peptide; TM: Transmembrane Domain; IG: Immunoglobulin-Like Domain).

[0083] FIG. 7 shows overexpression of FGFR4 in hepatocellular carcinoma (HCC) patients (n=57) in the tumor vs. the adjacent normal tissue as determined by real-time PCR.

[0084] FIG. 8 shows the corresponding Ct values of the detected FGFR4 overexpression shown in FIG. 7.

[0085] FIG. 9 shows that a single nucleotide polymorphism, G388R is highly represented in the Asian population, including HCC patients.

[0086] FIG. 10 depicts alpha-fetoprotein (AFP) levels in HCC patients, an oncofetal protein serving as a diagnostic marker for hepatocellular carcinoma. In patients with hepatoma, the incidence of elevated AFP levels correlates with tumor burden (60-70% of HCC patients exhibit AFP elevation). FIG. 10 shows that the homozygous 388Arg genotype correlates with an increased AFP secretion at the point of tumor resection.

[0087] FIG. 11 shows elevated AFP production caused by stimulation of FGFR4 in the HCC cell line HuH7 using 50 and 100 ng/ml of the specific ligand FGF19.

[0088] FIG. 12 shows elevated AFP production caused by stimulation of FGFR4 in the HCC cell line HepG2 using 50 and 100 ng/ml of the specific ligand FGF19.

[0089] FIG. 13 depicts gene silencing of FGFR4 by siRNA. A=control siRNA, B=FGFR4 siRNA.

[0090] FIG. 14 shows AFP production in HuH7 cells after gene silencing of FGFR4 by siRNA.

[0091] FIG. 15 shows AFP production in HuH7 cells after exposure to 0, 1, 5 and 10 μM of the commercially available non-selective FGFR inhibitor PD173074. SF=serum free

[0092] FIG. 16 depicts the viability of HuH7 exposed to the FGFR inhibitor PD173074. An exquisite anti-proliferative effect can be observed.

[0093] FIG. 17 depicts a decreased Tyrosinphosphorylation of TEC mutants. Reduced tyrosine phosphorylation was observed for TEC L89R, TEC W531R and TEC P587L, but not TEC R563K (IP=immunoprecipitation, IB=immunoblot, α-HA=anti Hemagglutinin antibody, α-PY=anti phosphor tyrosin antibody).

[0094] FIG. 18 illustrates the genetic alterations of TEC-kinase identified by the present inventors (TEC L89R, TEC W531R and TEC P587L).

[0095] FIG. 19 shows a decreased MAPK signaling of TEC mutants indicated by decreased MAPK phosphorylation. No activation of the MAPK pathway was observed for TEC L89R, TEC W531R and TEC P587L.

[0096] FIG. 20 depicts a c-fos gene reporter assay (HEK293 cells, 18 h), performed to compare TEC wt with TEC mutants. TEC kinase is involved in B-cell receptor induced c-fos promoter activity (Aoki, N., et al., J Biol. Chem. 2004 Mar. 12; 279(11):10765-10775 (2004), Epub 2003 Dec. 16). Overexpression of TEC wt and TEC R563K showed enhanced luciferase expression but not TEC L89R, TEC W531R, TEC P589L and TEC KM.

[0097] FIG. 21 depicts a decreased Stat3 activation of the TEC mutants.

[0098] FIG. 22 shows an in vitro Ubiquitination assay Hek293 transfected with myc-Ubiquitin and Flag-protein of interest. An exchange of amino acid 985 from Serine to Asparagine resulted in a protein of higher stability that is less sensitive to ubiquitination.

[0099] FIG. 23 shows the overexpression of TYK2 mutants in HEK293 cells.

[0100] FIG. 24 depicts tumor cell lines, control cell lines, and tissues from healthy individuals. The name, origin, reference number, and supplier/source of the tumor cell lines, normal cell lines, and tissues from healthy individuals analyzed in the screen are specified. Related tumor cell lines are indicated by parenthesized asterisks and identical numerals. (ATCC: The American Type Culture Collection, Manassas (VA), USA; DKFZ: Tumorbank Deutsches Krebsforschungszentrum, Heidelberg, Germany; DSMZ: German Collection of Microorganisms and Cell Cultures, Braunschweig, Germany; ECACC: The European Collection of Cell Cultures, Porton Down, Salisbury, UK)

[0101] FIG. 25 lists the primary tumor samples used, identifiers for the 55 primary kidney, prostate and breast cancer samples are listed.

[0102] FIG. 26 shows the primers used for PCR amplification and sequencing of PTK genes.

[0103] FIG. 27 shows the primers used for PCR amplification and sequencing of PTK gene fragments using genomic DNA as template.

[0104] FIG. 28 indicates the NCBI accession numbers of PTK reference sequences. Accession numbers of NCBI (http://www.ncbi.nlm.nih.gov) sequence files that served as references for sequences alignments are listed.

[0105] FIG. 29 lists the genetic alterations identified in all cDNA samples. Sequence differences occurring in all cDNA samples analyzed are shown. References for previously described alterations are provided. Homozygocity (HO) or heterozygocity (HE) is indicated.

[0106] FIG. 30 shows the characterization of each tumor- and control cell line with regard to somatic and germline alterations in the transcripts of PTK genes. Somatic mutations are underlined.

[0107] FIG. 31 depicts the characterization of PTK genes with regard to identified somatic and germline alterations in the transcripts of 276 tumor cell lines and control samples. For each tyrosine kinase gene, the spectrum of identified genetic alterations and the corresponding patterns of affected tumor cell lines or control samples are presented. Receptor- and non-receptor tyrosine kinase genes reflect the categorization into subfamilies, cancer cell lines are subdivided according to their tissue origin. The total sample number carrying a given sequence variant is indicated. Heterozygocity is indicated by a hash.

[0108] FIG. 32 lists the SEQ ID Nos for both the amino acid sequences (“protein”) and the nucleic acid sequences (“nt”) of the identified somatic alterations.

[0109] FIG. 33 lists the SEQ ID Nos for both the amino acid sequences (“protein”) and the nucleic acid sequences (“nt”) of the identified germline alterations.

[0110] FIG. 34 specifies the frameshift alterations and insertions. Detailed amino acid sequence information is provided for selected frameshift (fs) alterations and insertions. Nomenclature of sequence alterations is based on suggestions by the Human Genome Variation Society (HGVS; Kong-Beltran, M., et al., Cancer Res, 66: 283-289 (2006)).

[0111] FIG. 35 depicts the domain localization and tissue distribution of identified polymorphisms (abbreviations for the Ig-like domain: [A]=H199_Q247delins48; [B]=T311_Q422del (Bounacer, et al, 2002, supra)*).

[0112] FIG. 36 shows the genetic alterations analyzed in primary tumor samples.

[0113] FIG. 37 depicts the domain localization and tissue distribution of identified somatic mutations.

[0114] FIG. 38 depicts the absolute numbers of somatic mutations in transcribed PTK genes from 254 tumor cell lines.

[0115] FIG. 39 depicts the normalized mutational frequencies of transcribed PTK genes. Somatic mutation frequencies—normalized with respect to the expression status among the 254 tumor cell lines—are provided for each PTK gene and expressed as number of mutations per 1 Mb of cDNA.

### DETAILED DESCRIPTION OF THE INVENTION

[0116] The present invention relates to altered kinase polypeptides, nucleic acids encoding such polypeptides, cells containing such nucleic acids, antibodies to such polypeptides, assays utilizing such polypeptides, and methods relating to all of the foregoing. The present invention is based upon the identification of mutant kinase polypeptides and kinase variants involved in human malignancies. The polypeptides and nucleic acids of the invention may be produced using well-known and standard synthesis techniques when given the sequences presented herein.

[0117] The term “nucleic acid molecule” as used herein refers to any nucleic acid in any possible configuration, such as single stranded, double stranded or a combination thereof. Nucleic acids include for instance DNA molecules, RNA molecules, analogues of the DNA or RNA generated using nucleotide analogues or using nucleic acid chemistry, locked nucleic acid molecules (LNA), protein nucleic acids molecules (PNA) and tecto-RNA molecules (e.g. Liu, B., et al., J. Am. Chem. Soc. 126, 4076-4077 (2004)). LNA has a modified RNA backbone with a methylene bridge between C4′ and O2′, providing the respective molecule with a higher duplex stability and nuclease resistance. DNA or RNA may be of genomic or synthetic origin. A respective nucleic acid may furthermore contain non-natural nucleotide analogues and/or be linked to an affinity tag or a label.

[0118] Many nucleotide analogues are known and can be used in nucleic acids used in the methods of the invention. A nucleotide analogue is a nucleotide containing a modification at for instance the base, sugar, or phosphate moieties. As an illustrative example, a substitution of 2′-OH residues of siRNA with 2′F, 2′O-Me or 2′H residues is known to improve the in vivo stability of the respective RNA. Modifications at the base moiety include natural and synthetic modifications of A, C, G, and T/U, different purine or pyrimidine bases, such as uracil-5-yl, hypoxanthin-9-yl, and 2-aminoadenin-9-yl, as well as non-purine or non-pyrimidine nucleotide bases. Other nucleotide analogues serve as universal bases. Universal bases include 3-nitropyrrole and 5-nitroindole. Universal bases are able to form a base pair with any other base. Base modifications often can be combined with for example a sugar modification, such as for instance 2′-O-methoxyethyl, e.g. to achieve unique properties such as increased duplex stability.

### I. The Nucleic Acids of the Invention

[0119] As mentioned above, the invention also relates to nucleic acid molecules that encode a mutant protein kinase polypeptide. In some embodiments the mutant protein kinase polypeptide is one of AATYK (AATK), ABL1, ACK1, ALK, ARG, AXL, BMX, BRK, BTK, CCK4, CSK, DDR1, DDR2, EGFR, EPHA2, EPHA3, EPHA4, EPHA5, EPHA6, EPHB1, EPHB2, EPHB3, EPHB4, EPHB6, FAK, FER, FES, FGFR1, FGFR2, FGFR4, FLT3, FRK, FYN, HER2, HER3, HER4, IGF1R, INSR, ITK, JAK1, JAK2, JAK3, LCK, LMTK2 (AATYK2/BREK), LYN, MER, MET, NTRK1, NTRK2, NTRK3, PDGRFA, PTK-9, PYK2, RET, RON, ROR1, ROR2, ROS, RYK, SYK, TEC, TEK, TIE, TNK1, TYK2, TYRO3, VEGFR1, VEGFR2, YES1, and ZAP70. These mutant kinases include one or more of the mutations AATYK F1195C, ABL1 G417E, ABL1 N789S, ABL1 G883fsX12, ACK1 H37Y, ACK1 E111K, ACK1 R127H, ACK1 M393T, ACK1 A634T, ACK1 S699N, ACK1 P731L, ACK1 R748W, ACK1 G947D, ACK1 S985N, ALK G1580V, ARG E332K, ARG V345A, ARG K450R, ARG M657I, ARG P665T, ARG R668C, ARG Q696H, ARG K930R, ARG S968F, ARG Q994H, AXL M569I, AXL M589K, AXL G835V, BMX A150D, BMX S254del, BMX N267I, BRK W78fsX58, BTK M489I, BTK W588C, CCK4 D106N, CCK4 T410S, CCK4 M746L, CCK4 Q913H, CSK Q26X, DDR1 R60C, DDR1 V100A, DDR1 R248W, DDR2 M117I, DDR2 R478C, EGFR N115K, EGFR A289V, EGFR P332S, EGFR I646L, EGFR T678M, EGFR P753S, EGFR E922K, EGFR A1118T, EPHA2 R315Q, EPHA2 H333R, EPHA2 G391R, EPHA2 P460L, EPHA2 H609Y, EPHA2 M631T, EPHA2 G662S, EPHA2 V747I, EPHA2 L836R, EPHA2 E911K, EPHA2 V936M, EPHA2 R950 W, EPHA3 S46F, EPHA3 E53K, EPHA3 A777G, EPHA4 V234F, EPHA4 S803A, EPHA4 M877V, EPHA5 N81T, EPHA5 E85K, EPHA5 A672T, EPHA5 V891L, EPHA5 A957T, EPHA5 R981L, EPHA6 N291H, EPHA6 G513E, EPHA6 L622F, EPHB1 A39V, EPHB1 I837M, EPHB2 A83V, EPHB2 S98R, EPHB2 V136M, EPHB2 R270Q, EPHB2 P273L, EPHB2 R369Q, EPHB2 E686K, EPHB2 V762L, EPHB3 P6del, EPHB3 A517V, EPHB4 P231S, EPHB4 V547M, EPHB4 D576G, EPHB4 I610T, EPHB4 E890D, EPHB4 A955V, EPHB6 G353_E471del, EPHB6 A369T, EPHB6 L580F, EPHB6 E615K, EPHB6 A647V, EPHB6 S785R, EPHB6 R811C, FAK S329I, FAK Q440R, FAK A472V, FAK P901S, FER I240T, FER Q526L, FER Q599R, FES M323V, FES L690M, FES V724M, FGFR1 R78H, FGFR1 P252S, FGFR1 A268S, FGFR1 G539_K540del, FGFR21526T, FGFR4 Y367C, FLT3 V194M, FLT3 D358V, FLT3 V557I, FLT3 G757E, FLT3 R849H, FRK R64Q, FRK G119A, FRK R406H, FYN E521K, HER2 G518V, HER2 A830V, HER2 E930D, HER2 G1015E, HER2 A1216D, HER3 N126K, HER3 R611W, HER3 R667H, HER3 R1077W, HER3 R1089W, HER3 P1142H, HER3 L1177I, HER4 L753V, HER4 G936R, IGF1R T104M, IGF1R Y201H, IGF1R N209S, INSR L991I, ITK R448H, JAK1 I363V, JAK1 R494C, JAK1 N849fsX16, JAK2 F85S, JAK2 A377E, JAK2 L383P, JAK2 G571S, JAK2 E592K, JAK2 R1063H, JAK2 N1108S, JAK3 G62fsX47, JAK3 M511I, JAK3 P693L, JAK3 E698K, LCK L36fsX8, LCK F151S, LCK R484W, LMTK2 Q238P, LMTK2 A251T, LMTK2 G518V, LMTK2 D523Y, LMTK2 M758V, LMTK2 D793G, LMTK2 R828Q, LMTK2 L879M, LMTK2 A1008V, LYN F130V, MER E831Q, MET T17I, MET P366S, MET S691L, NTRK1 P453fsX15, NTRK1 L585fsX73, NTRK1 G595E, NTRK1 R748W, NTRK2 A586V, NTRK2 V622I, NTRK2 A647fsX54, NTRK3 V530fsX6, NTRK3 G608D, NTRK3 A631fsX33, PDGFRA G79D, PTK-9 D258E, PTK-9 K265R, PTK-9 N333S, PYK2 S9I, PYK2 C395Y, PYK2 E404Q, PYK2 D424Y, PYK2 E798Q, PYK2 M885L, PYK2 T978M, RET A750T, RON F574fsX23, RON Q955H, RON A1022_K1090del, RON V1070fsX12, ROR1 R185H, ROR1 R429Q, ROR1 S870I, ROR1 P883S, ROR2 R302H, ROR2 C389R, ROR2 D390fsX46, ROR2 P548S, ROS R187M, ROS D709fsX16, ROS Q865fsX90, ROS A1443S, RYK H250R, RYK R504H, RYK A559T, SYK M34fsX3, SYK I262L, SYK E315K, SYK A353T, SYK R520S, SYK V622A, TEC L89R, TEC W531R, TEC P587L, TEK A615T, TEK A1006T, TIE S470L, TIE M871T, TNK1 A299D, TYK2 A53T, TYK2 S340fsX26, TYK2 R701T, TYK2 D883N, TYK2 R901Q, TYK2 A928V, TYK2 P1104A, TYRO3 S324C, TYRO3 E489K, TYRO3 S531L, TYRO3 N788T, TYRO3 P822L, VEGFR1 G203W, VEGFR1 S437L, VEGFR1 A673V, VEGFR1 R781Q, VEGFR1 M938V, VEGFR2 E107K, VEGFR2 P1280S, YES1 K113Q, ZAP70 T155M, and ZAP70 M549V.

[0120] In another aspect, the invention is directed to a nucleic acid molecule encoding a protein kinase polypeptide variant. In some embodiments the protein kinase polypeptide variant is one of AATYK (AATK), ACK1, AXL, CCK4, EPHA1, EPHA2, EPHA3, EPHB3, FAK, FES, HER2, LMTK2 (AATYK2/BREK), MATK, MER, NTRK3, PDGRFA, PDGFRB, PTK-9, PYK2, RON, ROS, RYK, TEK, TNK1, TXK, TYK2, VEGFR1, VEGFR2, VEGFR3, and ZAP70 and includes at least one of the germline alterations AATYK G600C, AATYK G641S, AATYK F1163S, AATYK T1227M, ACK1 P725L, AXL G517S, CCK4 P693L, CCK4 A777V, CCK4 S795R, EPHA1 S936L, EPHA2 R876H, EPHA3 I564V, EPHB3 R514Q, FAK L926delinsPWRL, FES P397R, FES S72_K129del, FES E413fsX131, HER2 R1161Q, LMTK2 59101, MATK A496T, MER E823Q, NTRK3 E402_F410delinsV, NTRK3 G466_Y529delinsD, NTRK3 R711_V712ins16, PDGFRA L221F, PDGFRA S478P, PDGFRB T464M, PTK-9 E195_V196insRPEDHIG, PYK2 G414V, RON Q473_D515del, RON R627fsX23, RON R813_C814insQ, ROS C76fsX, RYK F516L, TEK V600L, TNK1 D472_R473del, TNK1 M598fsX5, TXK R63C, TXK Y414fsX15, TYK2 E971fsX67, VEGFR1 Y642H, VEGFR1 E982A, VEGFR1 P1201L, VEGFR2 C482R, VEGFR3 R1321Q and ZAP70 K186fsX.

[0121] In certain aspects of the invention, the nucleic acid molecules may be isolated, enriched, or purified. The mutant kinase polypeptide encoded by said nucleic acid molecules may include, consist essentially of or consist of the amino acid sequence set forth in SEQ ID Nos: 1-256, 513-516, 519, 524-525, 527-528, 533, 537-538, 543, 547-550, 562, 571-573, 583-587, 589-591, 598, 600-601, 607, 616, 620-621, 623-624, 626, 630, 632-634, 637, and 640-641. Also included are nucleic acids encoding mutant kinase polypeptide fragments of said amino acid sequences set forth in SEQ ID Nos: 1-256, 513-516, 519, 524-525, 527-528, 533, 537-538, 543, 547-550, 562, 571-573, 583-587, 589-591, 598, 600-601, 607, 616, 620-621, 623-624, 626, 630, 632-634, 637, and 640-641, as long as the mutation or mutated region is retained. In some embodiments, these fragments are at least 10, at least 15, at least 20, at least 30 or at least 35 amino acids long.

[0122] By “isolated” in reference to a nucleic acid is meant a polymer of nucleotides conjugated to each other, including DNA and RNA, that is isolated from a natural source or that is synthesized. The isolated nucleic acids of the present invention are not found in a pure or separated state in nature. Use of the term “isolated” indicates that a naturally occurring sequence has been removed from its normal cellular (i.e., chromosomal) environment. Thus, the sequence may be in a cell-free solution or placed in a different cellular environment. The term does not imply that the sequence is the only nucleotide chain present, but that it is essentially free (about 90-95% pure at least) of non-nucleotide material naturally associated with it, and thus is distinguished from isolated chromosomes.

[0123] By the use of the term “enriched” in reference to nucleic acid is meant that the specific DNA or RNA sequence constitutes a significantly higher fraction (2-5 fold) of the total DNA or RNA present in the cells or solution of interest than in normal or diseased cells or in the cells from which the sequence was taken. This could be achieved by reducing the amount of other DNA or RNA present, or by increasing the amount of the specific DNA or RNA sequence, or by a combination of the two. However, it should be noted that being enriched does not imply that there are no other DNA or RNA sequences present, it merely defines that the relative amount of the sequence of interest has been significantly increased.

[0124] The term “significant” is used to indicate that the level of increase is useful to the person making such an increase, and generally means an increase relative to other nucleic acids of about at least about 2 fold, such as at least about 5 to about 10 fold or even more. The term does also not imply that there is no DNA or RNA from other sources present. As an illustrative example, another source of DNA may, for example, include a yeast or bacterial genome, or a cloning vector. This term distinguishes from naturally occurring events, such as viral infection, or tumor type growths, in which the level of one mRNA may be naturally increased relative to other species of mRNA. That is, the term is meant to cover only those situations in which a person has intervened to elevate the proportion of the desired nucleic acid.

[0125] It is also advantageous for some purposes that a nucleotide sequence be present in purified form. The term “purified” in reference to nucleic acid does not require absolute purity (such as a homogeneous preparation). Instead, it represents an indication that the sequence is relatively more pure than in the natural environment (compared to the natural level this level should be at least 2-5 fold greater, e.g., in terms of mg/ml). Individual clones isolated from a cDNA library may be purified to electrophoretic homogeneity. The claimed DNA molecules obtained from these clones could be obtained directly from total DNA or from total RNA. The cDNA clones are not naturally occurring, rather they are typically obtained via manipulation of a partially purified naturally occurring substance (messenger RNA). The construction of a cDNA library from mRNA involves the creation of a synthetic substance (cDNA) and pure individual cDNA clones can be isolated from the synthetic library by clonal selection of the cells carrying the cDNA library. Thus, the process which includes the construction of a cDNA library from mRNA and isolation of distinct cDNA clones yields an approximately 10⁶-fold purification of the native message. Thus, purification of at least one order of magnitude, including two or three orders, and more, such as four or five orders of magnitude is expressly contemplated.

[0126] By a “mutant kinase polypeptide” as used herein is meant a protein kinase polypeptide including a somatic mutation. Such a mutation may be a deletion, insertion or substitution of one or more amino acids. In some embodiments, the term refers to a contiguous sequence of at least about 50, such as about 100, about 200, or about 300 amino acids set forth in the amino acid sequence of SEQ ID Nos: 1-256, or the corresponding full-length amino acid sequence, with the proviso that the desired mutation is included in said amino acid sequence. In case the mutation leads to a premature stop codon in the nucleotide sequence encoding the mutant kinase polypeptide, the sequence may even be shorter than the above 50 amino acids. The kinase polypeptide can be encoded by a full-length nucleic acid sequence, i.e. the complete coding sequence of the respective gene, or any portion of the full-length nucleic acid sequence, as long as the mutation of the polypeptide is retained.

[0127] The amino acid sequences will be substantially similar to the sequences shown in SEQ ID Nos: 1-256, or to fragments thereof. A sequence that is substantially similar to any one of the sequences of SEQ ID Nos: 1-256 or fragment thereof will in some embodiments have at least about 80, such as at least about 90% identity (in some embodiments at least about 95% or 99-100%) to the sequence of SEQ ID Nos: 1-256, with the proviso that the desired mutation is retained.

[0128] The term “kinase variant” or “protein kinase polypeptide variant” relates to a kinase polypeptide that includes a germline alteration. Such an alteration may be a deletion, insertion or substitution of one or more amino acids, and may include single nucleotide polymorphisms (SNPs). While such alterations may themselves not be pathological, they may play a role in the predisposition, development and progression of proliferative diseases and disorders, for example human malignancies. In the context of the present invention, the term ‘kinase variant’ in some embodiments refers to a contiguous sequence of at least about 50, such as about 100, about 200, or about 300 amino acids set forth in the amino acid sequence of SEQ ID Nos: 513-642, or the corresponding full-length amino acid sequence, with the proviso that said alteration is included in said amino acid sequence. In case the mutation leads to a premature stop codon in the nucleotide sequence encoding the kinase variant, the sequence may even be shorter than the above 50 amino acids. The kinase polypeptide can be encoded by a full-length nucleic acid sequence, i.e. the complete coding sequence of the respective gene, or any portion of the full-length nucleic acid sequence, as long as the alteration of the polypeptide is retained.

[0129] The amino acid sequences will be substantially similar to the sequences shown in SEQ ID Nos: 513-642 or to fragments thereof. A sequence that is substantially similar to any one of the sequences of SEQ ID Nos: 513-642 or fragment thereof will in some embodiments have at least 80, such as at least 90% identity (in some embodiments at least 95% or 99-100%) to the sequence of SEQ ID Nos: 513-642, with the proviso that the altered position or sequence is retained.

[0130] By “identity” is meant a property of sequences that measures their similarity or relationship. Identity is measured by dividing the number of identical residues by the total number of residues and gaps and multiplying the product by 100.

[0131] “Gaps” are spaces in an alignment that are the result of additions or deletions of amino acids. Thus, two copies of exactly the same sequence have 100% identity, but sequences that are less highly conserved, and have deletions, additions, or replacements, may have a lower degree of identity. Those skilled in the art will recognize that several computer programs are available for determining sequence identity using standard parameters, for example Blast (Altschul, et al. (1997) Nucleic Acids Res. 25:3389-3402), Blast2 (Altschul, et al. (1990) J. Mol. Biol. 215:403-410), and Smith-Waterman (Smith, et al. (1981) J. Mol. Biol. 147:195-197).

[0132] The term “mutated” or “mutant” in reference to a nucleic acid or a polypeptide refers to the exchange, deletion, or insertion of one or more nucleotides or amino acids, respectively, compared to the naturally occurring nucleic acid or polypeptide.

[0133] The term “altered” or “variant” in reference to a nucleic acid or polypeptide refers to polymorphisms, i.e. the exchange, deletion, or insertion of one or more nucleotides or amino acids, respectively, compared to the predominant form of the respective nucleic acid or polypeptide.

[0134] Also encompassed by the present invention are nucleic acid molecules substantially complementary to the above nucleic acid molecules. “Substantially complementary” as used herein refers to the fact that a given nucleic acid molecule is at least 90, at least 95, or 99 or 100% complementary to another nucleic acid. The term “complementary” or “complement” refers to two nucleotides that can form multiple favorable interactions with one another. Such favorable interactions include Watson-Crick base pairing. A nucleotide sequence is the complement of another nucleotide sequence if all of the nucleotides of the first sequence are complementary to all of the nucleotides of the second sequence.

[0135] The nucleic acids according to the invention may be isolated from a natural source by cDNA cloning or subtractive hybridization or other routine techniques known to a person skilled in the art. The natural source may be any organism. As an illustrative example, the nucleic acids may be isolated from a mammalian source. It may for example be of human origin. The natural source can include blood, semen, or tissue.

[0136] The term “mammalian” refers to any mammal, for example, species such as mice, rats, rabbits, guinea pigs, sheep, and goats, cats, dogs, monkeys, apes, and humans.

[0137] The nucleic acids of the invention may also be synthetic, meaning being synthesized by the triester method or by using an automated DNA synthesizer.

[0138] The above nucleic acid molecules of the invention encoding mutant kinase polypeptides, may further include a vector or promoter effective to initiate transcription in a host cell. The recombinant nucleic acid can alternatively contain a transcriptional initiation region functional in a cell, a sequence complementary to an RNA sequence encoding a kinase polypeptide and a transcriptional termination region functional in a cell. Specific vectors and host cell combinations are discussed herein. Thus, the present invention also encompasses nucleic acids of recombinant origin, such as a cell or an organism.

[0139] The term “vector” relates to a single or double-stranded circular nucleic acid molecule that can be transfected into cells and replicated within or independently of a cell genome. A circular double-stranded nucleic acid molecule can be cut and thereby linearized upon treatment with restriction enzymes. An assortment of nucleic acid vectors, restriction enzymes, and the knowledge of the nucleotide sequences cut by restriction enzymes are readily available to those skilled in the art. A nucleic acid molecule encoding a kinase can be inserted into a vector by cutting the vector with restriction enzymes and ligating the two pieces together.

[0140] The term “promoter” as used herein, refers to nucleic acid sequence needed for gene sequence expression. Promoter regions vary from organism to organism, but are well known to persons skilled in the art for different organisms. For example, in prokaryotes, the promoter region contains both the promoter (which directs the initiation of RNA transcription) as well as the DNA sequences which, when transcribed into RNA, will signal synthesis initiation. Such regions will normally include those 5′-non-coding sequences involved with initiation of transcription and translation, such as the TATA box, capping sequence, CAAT sequence, and the like.

[0141] The nucleic acids according to the invention may include, consist essentially of or consist of the nucleotide sequence set forth in any one of SEQ ID Nos: 257-512. Alternatively, the nucleic acids of the invention may also include, consists essentially of or consist of the nucleotide sequence set forth in any one of SEQ ID Nos: 643-646, 649, 654-655, 657-658, 663, 667-668, 673, 677-680, 692, 701-703, 713-717, 719-721, 728, 730-731, 737, 746, 750-751, 753-754, 756, 760, 762-764, 767, and 770-771.

[0142] Included within the scope of this invention are the functional equivalents of the herein-described isolated nucleic acid molecules. The degeneracy of the genetic code permits substitution of certain codons by other codons that specify the same amino acid and hence would give rise to the same protein. The nucleic acid sequence can vary substantially since, with the exception of methionine and tryptophan, the known amino acids can be coded for by more than one codon. Thus, portions or all of the kinase genes of the invention could be synthesized to give a nucleic acid sequence significantly different from that shown in SEQ ID Nos: 257-512, 643-646, 649, 654-655, 657-658, 663, 667-668, 673, 677-680, 692, 701-703, 713-717, 719-721, 728, 730-731, 737, 746, 750-751, 753-754, 756, 760, 762-764, 767, and 770-771. The encoded amino acid sequence thereof would, however, be preserved.

[0143] In addition, the nucleic acid sequence may include a nucleotide sequence which results from the addition, deletion or substitution of at least one nucleotide to the 5′-end and/or the 3′-end of the nucleic acid formula shown in SEQ ID Nos: 257-512, 643-646, 649, 654-655, 657-658, 663, 667-668, 673, 677-680, 692, 701-703, 713-717, 719-721, 728, 730-731, 737, 746, 750-751, 753-754, 756, 760, 762-764, 767, and 770-771, or a derivative thereof. Any nucleotide or polynucleotide may be used in this regard, provided that its addition, deletion or substitution does not alter the amino acid sequence of SEQ ID Nos: 1-256, 513-516, 519, 524-525, 527-528, 533, 537-538, 543, 547-550, 562, 571-573, 583-587, 589-591, 598, 600-601, 607, 616, 620-621, 623-624, 626, 630, 632-634, 637, and 640-641, which is encoded by the nucleotide sequence. For example, the present invention is intended to include any nucleic acid sequence resulting from the addition of ATG as an initiation codon at the 5′-end of the inventive nucleic acid sequence or its derivative, or from the addition of TTA, TAG or TGA as a termination codon at the 3′-end of the inventive nucleotide sequence or its derivative. Moreover, the nucleic acid molecule of the present invention may, as necessary, have restriction endonuclease recognition sites added to its 5′-end and/or 3′-end.

[0144] Such functional alterations of a given nucleic acid sequence afford an opportunity to promote secretion and/or processing of heterologous proteins encoded by foreign nucleic acid sequences fused thereto. All variations of the nucleotide sequence of the kinase genes of the invention and fragments thereof permitted by the genetic code are, therefore, included in this invention.

[0145] Further, it is possible to delete codons or to substitute one or more codons with codons other than degenerate codons to produce a structurally modified polypeptide, but one which has substantially the same utility or activity as the polypeptide produced by the unmodified nucleic acid molecule. As recognized in the art, the two polypeptides are functionally equivalent, as are the two nucleic acid molecules that give rise to their production, even though the differences between the nucleic acid molecules are not related to the degeneracy of the genetic code.

### II. Nucleic Acid Probes, Methods, and Kits for the Detection of Mutant Kinases.

[0146] The nucleic acid molecules of the invention are also useful for the design of hybridization probes to facilitate identification and cloning of mutated kinase polypeptides or kinase variants, the design of PCR probes to facilitate cloning of mutated kinase polypeptides or kinase variants, obtaining antibodies directed against mutated kinase polypeptides and kinase variants, and designing antisense oligonucleotides.

[0147] Therefore, the invention is also directed to nucleic acid probes for the detection of nucleic acid molecules encoding a mutant kinase polypeptide or a kinase polypeptide variant in a sample.

[0148] The mutant kinase polypeptide may in some embodiments be selected from the group consisting of AATYK (AATK), ABL1, ACK1, ALK, ARG, AXL, BMX, BRK, BTK, CCK4, CSK, DDR1, DDR2, EGFR, EPHA2, EPHA3, EPHA4, EPHA5, EPHA6, EPHB1, EPHB2, EPHB3, EPHB4, EPHB6, FAK, FER, FES, FGFR1, FGFR2, FGFR4, FLT3, FRK, FYN, HER2, HER3, HER4, IGF1R, INSR, ITK, JAK1, JAK2, JAK3, LCK, LMTK2 (AATYK2/BREK), LYN, MER, MET, NTRK1, NTRK2, NTRK3, PDGRFA, PTK-9, PYK2, RET, RON, ROR1, ROR2, ROS, RYK, SYK, TEC, TEK, TIE, TNK1, TYK2, TYRO3, VEGFR1, VEGFR2, YES1, and ZAP70, and may include at least one of the mutations AATYK F1195C, ABL1 G417E, ABL1 N789S, ABL1 G883fsX12, ACK1 H37Y, ACK1 E111K, ACK1 R127H, ACK1 M393T, ACK1 A634T, ACK1 S699N, ACK1 P731L, ACK1 R748W, ACK1 G947D, ACK1 S985N, ALK G1580V, ARG E332K, ARG V345A, ARG K450R, ARG M657I, ARG P665T, ARG R668C, ARG Q696H, ARG K930R, ARG S968F, ARG Q994H, AXL M569I, AXL M589K, AXL G835V, BMX A150D, BMX S254del, BMX N2671, BRK W78fsX58, BTK M489I, BTK W588C, CCK4 D106N, CCK4 T410S, CCK4 M746L, CCK4 Q913H, CSK Q26X, DDR1 R60C, DDR1 V100A, DDR1 R248W, DDR2 M117I, DDR2 R478C, EGFR N115K, EGFR A289V, EGFR P332S, EGFR I646L, EGFR T678M, EGFR P753S, EGFR E922K, EGFR A1118T, EPHA2 R315Q, EPHA2 H333R, EPHA2 G391R, EPHA2 P460L, EPHA2 H609Y, EPHA2 M631T, EPHA2 G662S, EPHA2 V747I, EPHA2 L836R, EPHA2 E911K, EPHA2 V936M, EPHA2 R950 W, EPHA3 S46F, EPHA3 E53K, EPHA3 A777G, EPHA4 V234F, EPHA4 S803A, EPHA4 M877V, EPHA5 N81T, EPHA5 E85K, EPHA5 A672T, EPHA5 V891L, EPHA5 A957T, EPHA5 R981L, EPHA6 N291H, EPHA6 G513E, EPHA6 L622F, EPHB1 A39V, EPHB1 I837M, EPHB2 A83V, EPHB2 S98R, EPHB2 V136M, EPHB2 R270Q, EPHB2 P273L, EPHB2 R369Q, EPHB2 E686K, EPHB2 V762L, EPHB3 P6del, EPHB3 A517V, EPHB4 P231S, EPHB4 V547M, EPHB4 D576G, EPHB4 I610T, EPHB4 E890D, EPHB4 A955V, EPHB6 G353_E471del, EPHB6 A369T, EPHB6 L580F, EPHB6 E615K, EPHB6 A647V, EPHB6 S785R, EPHB6 R811C, FAK S329I, FAK Q440R, FAK A472V, FAK P901S, FER I240T, FER Q526L, FER Q599R, FES M323V, FES L690M, FES V724M, FGFR1 R78H, FGFR1 P252S, FGFR1 A268S, FGFR1 G539_K540del, FGFR21526T, FGFR4 Y367C, FLT3 V194M, FLT3 D358V, FLT3 V557I, FLT3 G757E, FLT3 R849H, FRK R64Q, FRK G119A, FRK R406H, FYN E521K, HER2 G518V, HER2 A830V, HER2 E930D, HER2 G1015E, HER2 A1216D, HER3 N126K, HER3 R611W, HER3 R667H, HER3 R1077W, HER3 R1089W, HER3 P1142H, HER3 L1177I, HER4 L753V, HER4 G936R, IGF1R T104M, IGF1R Y201H, IGF1R N209S, INSR L991I, ITK R448H, JAK1 I363V, JAK1 R494C, JAK1 N849fsX16, JAK2 F85S, JAK2 A377E, JAK2 L383P, JAK2 G571S, JAK2 E592K, JAK2 R1063H, JAK2 N1108S, JAK3 G62fsX47, JAK3 M511I, JAK3 P693L, JAK3 E698K, LCK L36fsX8, LCK F151S, LCK R484W, LMTK2 Q238P, LMTK2 A251T, LMTK2 G518V, LMTK2 D523Y, LMTK2 M758V, LMTK2 D793G, LMTK2 R828Q, LMTK2 L879M, LMTK2 A1008V, LYN F130V, MER E831Q, MET T171, MET P366S, MET S691L, NTRK1 P453fsX15, NTRK1 L585fsX73, NTRK1 G595E, NTRK1 R748W, NTRK2 A586V, NTRK2 V622I, NTRK2 A647fsX54, NTRK3 V530fsX6, NTRK3 G608D, NTRK3 A631fsX33, PDGFRA G79D, PTK-9 D258E, PTK-9 K265R, PTK-9 N333S, PYK2 S9I, PYK2 C395Y, PYK2 E404Q, PYK2 D424Y, PYK2 E798Q, PYK2 M885L, PYK2 T978M, RET A750T, RON F574fsX23, RON Q955H, RON A1022_K1090del, RON V1070fsX12, ROR1 R185H, ROR1 R429Q, ROR1 S870I, ROR1 P883S, ROR2 R302H, ROR2 C389R, ROR2 D390fsX46, ROR2 P548S, ROS R187M, ROS D709fsX16, ROS Q865fsX90, ROS A1443S, RYK H250R, RYK R504H, RYK A559T, SYK M34fsX3, SYK I262L, SYK E315K, SYK A353T, SYK R520S, SYK V622A, TEC L89R, TEC W531R, TEC P587L, TEK A615T, TEK A1006T, TIE S470L, TIE M871T, TNK1 A299D, TYK2 A53T, TYK2 S340fsX26, TYK2 R701T, TYK2 D883N, TYK2 R901Q, TYK2 A928V, TYK2 P1104A, TYRO3 S324C, TYRO3 E489K, TYRO3 S531L, TYRO3 N788T, TYRO3 P822L, VEGFR1 G203W, VEGFR1 S437L, VEGFR1 A673V, VEGFR1 R781Q, VEGFR1 M938V, VEGFR2 E107K, VEGFR2 P1280S, YES1 K113Q, ZAP70 T155M, and ZAP70 M549V.

[0149] The nucleic acid probes of the invention may include, consist essentially of or consist of nucleotide sequences that will hybridize to a target region in the nucleic acid sequence set forth in any of SEQ ID Nos: 257-512, or a functional equivalent thereof. The target region the nucleic acid probes of the invention are binding to include the mutation or mutated region, indicated in FIG. 32.

[0150] In another embodiment, the nucleic acid probe may be suitable for the detection of kinase variants selected from the group of AATYK (AATK), ACK1, AXL, CCK4, EPHA1, EPHA2, EPHA3, EPHB3, FAK, FES, HER2, LMTK2 (AATYK2/BREK), MATK, MER, NTRK3, PDGRFA, PDGFRB, PTK-9, PYK2, RON, ROS, RYK, TEK, TNK1, TXK, TYK2, VEGFR1, VEGFR2, VEGFR3, and ZAP70 and including at least one of the germline alterations AATYK G600C, AATYK G641S, AATYK F1163S, AATYK T1227M, ACK1 P725L, AXL G517S, CCK4 P693L, CCK4 A777V, CCK4 S795R, EPHA1 S936L, EPHA2 R876H, EPHA3 I564V, EPHB3 R514Q, FAK L926delinsPWRL, FES P397R, FES S72_K129del, FES E413fsX131, HER2 R1161Q, LMTK2 S910I, MATK A496T, MER E823Q, NTRK3 E402_F410delinsV, NTRK3 G466_Y529delinsD, NTRK3 R711_V712ins16, PDGFRA L221F, PDGFRA S478P, PDGFRB T464M, PTK-9 E195_V196insRPEDHIG, PYK2 G414V, RON Q473_D515del, RON R627fsX23, RON R813_C814insQ, ROS C76fsX, RYK F516L, TEK V600L, TNK1 D472_R473del, TNK1 M598fsX5, TXK R63C, TXK Y414fsX15, TYK2 E971fsX67, VEGFR1 Y642H, VEGFR1 E982A, VEGFR1 P1201L, VEGFR2 C482R, VEGFR3 R1321Q and ZAP70 K186fsX.

[0151] The kinase “target region” is the nucleotide base sequence set forth in SEQ ID Nos: 257-512, 643-646, 649, 654-655, 657-658, 663, 667-668, 673, 677-680, 692, 701-703, 713-717, 719-721, 728, 730-731, 737, 746, 750-751, 753-754, 756, 760, 762-764, 767, and 770-771 or the corresponding full-length sequences, a functional derivative thereof, or a fragment thereof to which the nucleic acid probe will specifically hybridize, as long as said nucleotide base sequence includes any one of the above indicated mutations or alterations. Specific hybridization indicates that in the presence of other nucleic acids the probe only hybridizes detectably with the target region of the mutant kinase or kinase variant of the invention.

[0152] A nucleic acid probe of the present invention may be used to probe a sample or a chromosomal/cDNA library by usual hybridization methods to detect the presence of nucleic acid molecules of the present invention. A chromosomal DNA or cDNA library may be prepared from appropriate cells according to methods well established in the art.

[0153] In order to obtain nucleic acid probes having nucleotide sequences which correspond to altered portions of the amino acid sequence of the polypeptide of interest, chemical synthesis can be carried out. The synthesized nucleic acid probes may be first used as primers in a polymerase chain reaction (PCR) carried out in accordance with recognized PCR techniques, essentially according to standard PCR Protocols utilizing the appropriate template, in order to obtain the probes of the present invention.

[0154] One skilled in the art will readily be able to design such probes based on the sequence disclosed herein using methods of computer alignment and sequence analysis well known in the art. The hybridization probes of the present invention can be labeled by standard labeling techniques such as with a radiolabel, enzyme label, fluorescent label, biotin-avidin label, chemiluminescence, and the like. After hybridization, the probes may be visualized using known methods.

[0155] The nucleic acid probes of the present invention include RNA, as well as DNA probes, such probes being generated using techniques known in the art. The nucleic acid probe may be immobilized on a solid support. Examples of such solid supports include, but are not limited to, plastics such as polycarbonate, complex carbohydrates such as agarose and sepharose, and acrylic resins, such as polyacrylamide and latex beads. Techniques for coupling nucleic acid probes to such solid supports are well known in the art.

[0156] The test samples suitable for nucleic acid probing methods of the present invention include, for example, cells or nucleic acid extracts of cells, or biological fluids. The samples used in the above-described methods will vary based on the assay format, the detection method and the nature of the tissues, cells or extracts to be assayed. Methods for preparing nucleic acid extracts of cells are well known in the art and can be readily adapted in order to obtain a sample which is compatible with the method utilized.

[0157] One method of detecting the presence of nucleic acids of the invention in a sample includes (a) contacting said sample with the above-described nucleic acid probe under conditions such that hybridization occurs, and (b) detecting the presence of said probe bound to said nucleic acid molecule. One skilled in the art would select the nucleic acid probe according to techniques known in the art as described above. Samples to be tested include but should not be limited to RNA samples of human tissue.

[0158] The above method may also utilize a set of the nucleic acid probes of the invention to simultaneously detect the presence of the nucleic acids of the invention in a sample. Such a method may be useful for the diagnosis of proliferative diseases or disorders in a subject and may also be useful to predict the risk of cancer with high predictive accuracy and/or to choose an adequate therapy.

[0159] The set of nucleic acid probes utilized in such a method of the invention may be chosen in view of the condition to be detected and may include nucleic acid probes for all or any subset of the nucleic acid molecules that are implicated by the present invention in the predisposition, development and progression of cancer, including the nucleotide sequences set forth in SEQ ID Nos: 257-512 and 643-772. Such a subset may include at least 2, for example at least 5, 7, 10, 12, 16, 20, 30, 40, 50, 60, 70, 80, 90, 100, 110, 120, 150, 200, 250, 300, 350 or any other number, for example all of the above sequences.

[0160] For the above method one or more nucleic acid probes may be bound to or immobilized on a solid support. Said solid support may be a chip, for example a DNA microchip.

[0161] A kit for detecting the presence of nucleic acids of the invention in a sample includes at least one container means having disposed therein the above-described nucleic acid probe. The kit may further include other containers that include one or more of the following: wash reagents and reagents capable of detecting the presence of bound nucleic acid probe. Examples of detection reagents include, but are not limited to radiolabeled probes, enzymatic labeled probes (horseradish peroxidase, alkaline phosphatase), and affinity labeled probes (biotin, avidin, or steptavidin).

[0162] In detail, a compartmentalized kit includes any kit in which reagents are included in separate containers. Such containers include small glass containers, plastic containers or strips of plastic or paper. Such containers allow the efficient transfer of reagents from one compartment to another compartment such that the samples and reagents are not cross-contaminated and the agents or solutions of each container can be added in a quantitative fashion from one compartment to another. Such containers will include a container which will accept the test sample, a container which contains the probe or primers used in the assay, containers which contain wash reagents (such as phosphate buffered saline, Tris buffers, and the like), and containers which contain the reagents used to detect the hybridized probe, bound antibody, amplified product, or the like. One skilled in the art will readily recognize that the nucleic acid probes described in the present invention can readily be incorporated into one of the established kit formats which are well known in the art.

III. Dna Constructs Including a Nucleic Acid Molecule of the Invention and Cells Containing these Constructs.

[0163] The invention further describes a recombinant cell or tissue including a nucleic acid molecule according to the invention, as detailed above.

[0164] In such cells, the nucleic acid may be under the control of the genomic regulatory elements, or may be under the control of heterologous regulatory elements including a heterologous promoter.

[0165] The term “heterologous” refers to the relationship between two or more nucleic acid or protein sequences that are derived from different sources. For example, a promoter is heterologous with respect to a transcribable polynucleotide sequence if such a combination is not normally found in nature. In addition, a particular sequence may be “heterologous” with respect to a cell or organism in that it encodes a protein or is included in a protein, for example a recombinant protein, that is not normally expressed by the host cell, tissue, or species. Such a heterologous protein accordingly generally is or has been inserted into the respective host cell, tissue, or species. Accordingly, a heterologous promoter is not normally coupled in vivo transcriptionally to the coding sequence for the kinase polypeptides.

[0166] Therefore, the present invention also relates to a recombinant DNA molecule including, 5′ to 3′, a promoter effective to initiate transcription in a host cell and the above-described nucleic acid molecules. In addition, the present invention relates to a recombinant DNA molecule including a vector and an above-described nucleic acid molecule. The present invention also relates to a nucleic acid molecule including a transcriptional region functional in a cell, a sequence complementary to an RNA sequence encoding an amino acid sequence corresponding to the above-described polypeptide, and a transcriptional termination region functional in said cell. The above-described molecules may be isolated and/or purified DNA molecules.

[0167] The present invention further relates to a cell or organism that contains an above-described nucleic acid molecule and thereby is capable of expressing a polypeptide. The polypeptide may be purified from cells which have been altered to express the polypeptide. A cell is said to be “altered to express a desired polypeptide” when the cell, through genetic manipulation, is made to produce a protein which it normally does not produce or which the cell normally produces at lower levels. One skilled in the art can readily adapt procedures for introducing and expressing either genomic, cDNA, or synthetic sequences into either eukaryotic or prokaryotic cells.

[0168] A nucleic acid molecule, such as DNA, is said to be “capable of expressing” a polypeptide if it contains nucleotide sequences which contain transcriptional and translational regulatory information and such sequences are “operably linked” to nucleotide sequences which encode the polypeptide. An operable linkage is a linkage in which the regulatory DNA sequences and the DNA sequence sought to be expressed are connected in such a way as to permit gene sequence expression. The precise nature of the regulatory regions needed for gene sequence expression may vary from organism to organism, but shall in general include a promoter region which, in prokaryotes, contains both the promoter (which directs the initiation of RNA transcription) as well as the DNA sequences which, when transcribed into RNA, will signal synthesis initiation. Such regions will normally include those 5′-non-coding sequences involved with initiation of transcription and translation, such as the TATA box, capping sequence, CAAT sequence, and the like.

[0169] If desired, the non-coding region 3′ to the sequence encoding a mutant kinase of the invention may be obtained by the above-described methods. This region may be retained for its transcriptional termination regulatory sequences, such as termination and polyadenylation. Thus, by retaining the 3′-region naturally contiguous to the DNA sequence encoding a kinase of the invention, the transcriptional termination signals may be provided. Where the transcriptional termination signals are not satisfactorily functional in the expression host cell, then a 3′ region functional in the host cell may be substituted.

[0170] Two DNA sequences (such as a promoter region sequence and a sequence encoding a mutant kinase of the invention) are said to be operably linked if the nature of the linkage between the two DNA sequences does not (1) result in the introduction of a frame-shift mutation, (2) interfere with the ability of the promoter region sequence to direct the transcription of a gene sequence encoding a kinase of the invention, or (3) interfere with the ability of the gene sequence of a kinase of the invention to be transcribed by the promoter region sequence.

[0171] Thus, a promoter region would be operably linked to a DNA sequence if the promoter were capable of effecting transcription of that DNA sequence. Thus, to express a gene encoding a mutant kinase of the invention, transcriptional and translational signals recognized by an appropriate host are necessary.

[0172] The present invention encompasses the expression of a gene encoding a kinase of the invention (or a functional derivative thereof) in either prokaryotic or eukaryotic cells. Prokaryotic hosts are, generally, very efficient and convenient for the production of recombinant proteins and are, therefore, one type of expression system for mutant kinases of the invention. Prokaryotes most frequently are represented by various strains of E. coli. However, other microbial strains may also be used, including other bacterial strains.

[0173] In prokaryotic systems, plasmid vectors that contain replication sites and control sequences derived from a species compatible with the host may be used. Examples of suitable plasmid vectors may include pBR322, pUC118, pUC119 and the like; suitable phage or bacteriophage vectors may include γgt10, γgt11 and the like; and suitable virus vectors may include pMAM-neo, pKRC and the like. In some embodiments the selected vector of the present invention has the capacity to replicate in the selected host cell.

[0174] Recognized prokaryotic hosts include bacteria such as E. coli, Bacillus, Streptomyces, Pseudomonas, Salmonella, Serratia, and the like. However, under such conditions, the polypeptide will not be glycosylated. The prokaryotic host must be compatible with the replicon and control sequences in the expression plasmid.

[0175] To express a kinase of the invention (or a functional derivative thereof) in a prokaryotic cell, it is necessary to operably link the sequence encoding the kinase of the invention to a functional prokaryotic promoter. Such promoters may be either constitutive or regulatable (i.e., inducible or derepressible). Examples of constitutive promoters include the int promoter of bacteriophage λ, the bla promoter of the β-lactamase gene sequence of pBR322, and the cat promoter of the chloramphenicol acetyl transferase gene sequence of pPR325, and the like. Examples of inducible prokaryotic promoters include the major right and left promoters of bacteriophage λ (P_{L} and P_{R}), the trp, recA, λacZ, λacI, and gal promoters of E. coli, the α-amylase (Ulmanen et al., J. Bacteriol. 162:176-182, 1985) and the ι-28-specific promoters of B. subtilis (Gilman et al., Gene Sequence 32:11-20, 1984), and the promoters of the bacteriophages of Bacillus, and Streptomyces promoters (Ward et al., Mol. Gen. Genet. 203:468-478, 1986). Prokaryotic promoters are reviewed by Glick (Ind. Microbiot. 1:277-282, 1987), Cenatiempo (Biochimie 68:505-516, 1986), and Gottesman (Ann. Rev. Genet. 18:415-442, 1984).

[0176] Proper expression in a prokaryotic cell also requires the presence of a ribosome-binding site upstream of the gene sequence-encoding sequence. Such ribosome-binding sites are disclosed, for example, by Gold et al. (Ann. Rev. Microbiol. 35:365-404, 1981). The selection of control sequences, expression vectors, transformation methods, and the like are dependent on the type of host cell used to express the gene. As used herein, “cell”, “cell line”, and “cell culture” may be used interchangeably and all such designations include progeny. Thus, the words “transformants” or “transformed cells” include the primary subject cell and cultures derived therefrom, without regard to the number of transfers. It is also understood that all progeny may not be precisely identical in DNA content, due to deliberate or inadvertent mutations. However, as defined, mutant progeny have the same functionality as that of the originally transformed cell.

[0177] Host cells which may be used in the expression systems of the present invention are not strictly limited, provided that they are suitable for use in the expression of the kinase polypeptide of interest. Suitable hosts may often include eukaryotic cells. Examples of eukaryotic hosts include, but are not limited to, yeast, fungi, insect cells, mammalian cells either in vivo, or in tissue culture. Mammalian cells which may be useful as hosts include for example HeLa cells, cells of fibroblast origin such as VERO or CHO-K1, or cells of lymphoid origin and their derivatives. In some embodiments the mammalian host cells include any, including all human cancer cell lines.

[0178] Another suitable host is an insect cell, for example the Drosophila larvae. Using insect cells as hosts, the Drosophila alcohol dehydrogenase promoter can be used (Rubin, Science 240:1453-1459, 1988). Alternatively, baculovirus vectors can be engineered to express large amounts of kinases of the invention in insect cells (Jasny, Science 238:1653, 1987).

[0179] Any of a series of yeast expression systems can be utilized which incorporate promoter and termination elements from the actively expressed sequences coding for glycolytic enzymes that are produced in large quantities when yeast are grown in mediums rich in glucose. Known glycolytic gene sequences can also provide very efficient transcriptional control signals. Yeast provides substantial advantages in that it can also carry out post-translational modifications. A number of recombinant DNA strategies exist utilizing strong promoter sequences and high copy number plasmids, which can be utilized for production of the desired proteins in yeast. Yeast recognizes leader sequences on cloned mammalian genes and secretes peptides bearing leader sequences (i.e., pre-peptides). Several possible vector systems are available for the expression of kinases of the invention in a mammalian host.

[0180] A wide variety of transcriptional and translational regulatory sequences may be employed, depending upon the nature of the host. The transcriptional and translational regulatory signals may be derived from viral sources, such as adenovirus, bovine papilloma virus, cytomegalovirus, simian virus, or the like, where the regulatory signals are associated with a particular gene sequence which has a high level of expression. Alternatively, promoters from mammalian expression products, such as actin, collagen, myosin, and the like, may be employed. Transcriptional initiation regulatory signals may be selected which allow for repression or activation, so that expression of the gene sequences can be modulated. Of interest are regulatory signals which are temperature-sensitive so that by varying the temperature, expression can be repressed or initiated, or are subject to chemical (such as metabolite) regulation.

[0181] Expression of mutant kinases of the invention in eukaryotic hosts requires the use of eukaryotic regulatory regions. Such regions will, in general, include a promoter region sufficient to direct the initiation of RNA synthesis. Examples of a suitable eukaryotic promoter include, but are not limited to, the promoter of the mouse metallothionein I gene sequence (Hamer et al., J. Mol. Appl. Gen. 1:273-288, 1982); the TK promoter of Herpes virus (McKnight, Cell 31:355-365, 1982); the SV40 early promoter (Benoist et al., Nature 290:304-31, 1981); and the yeast gal4 gene sequence promoter (Johnston et al., Proc. Natl. Acad. Sci. (USA) 79:6971-6975, 1982; Silver et al., Proc. Natl. Acad. Sci. (USA) 81:5951-5955, 1984).

[0182] Translation of eukaryotic mRNA is initiated at the codon which encodes the first methionine. For this reason, it may be desired to ensure that the linkage between a eukaryotic promoter and a DNA sequence which encodes a kinase of the invention (or a functional derivative thereof) does not contain any intervening codons which are capable of encoding a methionine (i.e., AUG). The presence of such codons results either in the formation of a fusion protein (if the AUG codon is in the same reading frame as the kinase of the invention coding sequence) or a frame-shift mutation (if the AUG codon is not in the same reading frame as the kinase of the invention coding sequence).

[0183] A nucleic acid molecule encoding a kinase of the invention and an operably linked promoter may be introduced into a recipient prokaryotic or eukaryotic cell either as a nonreplicating DNA or RNA molecule, which may either be a linear molecule ora closed covalent circular molecule. Since such molecules are incapable of autonomous replication, the expression of the gene may occur through the transient expression of the introduced sequence. Alternatively, permanent expression may occur through the integration of the introduced DNA sequence into the host chromosome.

[0184] A vector may be employed which is capable of integrating the desired gene sequences into the host cell chromosome. Cells which have stably integrated the introduced DNA into their chromosomes can be selected by also introducing one or more markers which allow for selection of host cells which contain the expression vector. The marker may provide for prototrophy to an auxotrophic host, biocide resistance, e.g., antibiotics, or heavy metals, such as copper, or the like. The selectable marker gene sequence can either be directly linked to the DNA gene sequences to be expressed, or introduced into the same cell by co-transfection. Additional elements may also be needed for optimal synthesis of mRNA. These elements may include splice signals, as well as transcription promoters, enhancers, and termination signals. cDNA expression vectors incorporating such elements include those described by Okayama (Mol. Cell. Biol. 3:280, 1983).

[0185] The introduced nucleic acid molecule can be incorporated into a plasmid or viral vector capable of autonomous replication in the recipient host. Any of a wide variety of vectors may be employed for this purpose. Factors of importance in selecting a particular plasmid or viral vector include: the ease with which recipient cells that contain the vector may be recognized and selected from those recipient cells which do not contain the vector; the number of copies of the vector which are desired in a particular host; and whether it is desirable to be able to “shuttle” the vector between host cells of different species.

[0186] An illustrative example of a prokaryotic vector is a plasmid, such as a plasmid capable of replication in E. coli (such as, for example, pBR322, ColE1, pSC101, pACYC 184, πVX). Bacillus plasmids include pC194, pC221, pT127, and the like. Suitable Streptomyces plasmids include p1J101 (Kendall et al., J. Bacteriol. 169:4177-4183, 1987), and streptomyces bacteriophages such as φC31. Pseudomonas plasmids are reviewed by John et al. (Rev. Infect. Dis. 8:693-704, 1986), and Izaki (Jpn. J. Bacteriol. 33:729-742, 1978).

[0187] Examples of an eukaryotic plasmid include, but are not limited to, BPV, vaccinia, SV40, 2-micron circle, and the like, or their derivatives. Such plasmids are well known in the art (e.g. Broach, Cell 28:203-204, 1982; Bollon et al., J. Clin. Hematol. Oncol. 10:39-48, 1980).

[0188] Once the vector or nucleic acid molecule containing the construct(s) has been prepared for expression, the DNA construct(s) may be introduced into an appropriate host cell by any of a variety of suitable means, i.e., transformation, transfection, conjugation, protoplast fusion, electroporation, particle gun technology, calcium phosphate-precipitation, direct microinjection, and the like. After the introduction of the vector, recipient cells are grown in a selective medium, which selects for the growth of vector-containing cells. Expression of the cloned gene(s) results in the production of a kinase of the invention, or fragments thereof. This can take place in the transformed cells as such, or following the induction of these cells to differentiate. A variety of incubation conditions can be used to form the peptide of the present invention. It may be desired to use conditions thatmimic physiological conditions.

[0189] The term “transfecting” defines a number of methods to insert a nucleic acid vector or other nucleic acid molecules into a cellular organism. These methods involve a variety of techniques, such as treating the cells with high concentrations of salt, an electric field, detergent, or DMSO to render the outer membrane or wall of the cells permeable to nucleic acid molecules of interest or use of various viral transduction strategies.

### IV. Proteins of the Invention

[0190] The mutant kinase polypeptides of the invention are selected from the group consisting of AATYK (AATK), ABL1, ACK1, ALK, ARG, AXL, BMX, BRK, BTK, CCK4, CSK, DDR1, DDR2, EGFR, EPHA2, EPHA3, EPHA4, EPHA5, EPHA6, EPHB1, EPHB2, EPHB3, EPHB4, EPHB6, FAK, FER, FES, FGFR1, FGFR2, FGFR4, FLT3, FRK, FYN, HER2, HER3, HER4, IGF1R, INSR, ITK, JAK1, JAK2, JAK3, LCK, LMTK2 (AATYK2/BREK), LYN, MER, MET, NTRK1, NTRK2, NTRK3, PDGRFA, PTK-9, PYK2, RET, RON, ROR1, ROR2, ROS, RYK, SYK, TEC, TEK, TIE, TNK1, TYK2, TYRO3, VEGFR1, VEGFR2, YES1, and ZAP70, and include at least one of the mutations AATYK F1195C, ABL1 G417E, ABL1 N789S, ABL1 G883fsX12, ACK1 H37Y, ACK1 E111K, ACK1 R127H, ACK1 M393T, ACK1 A634T, ACK1 S699N, ACK1 P731L, ACK1 R748W, ACK1 G947D, ACK1 S985N, ALK G1580V, ARG E332K, ARG V345A, ARG K450R, ARG M6571, ARG P665T, ARG R668C, ARG Q696H, ARG K930R, ARG S968F, ARG Q994H, AXL M569I, AXL M589K, AXL G835V, BMX A150D, BMX S254del, BMX N267I, BRK W78fsX58, BTK M4891, BTK W588C, CCK4 D106N, CCK4 T410S, CCK4 M746L, CCK4 Q913H, CSK Q26X, DDR1 R60C, DDR1 V100A, DDR1 R248W, DDR2 M117I, DDR2 R478C, EGFR N115K, EGFR A289V, EGFR P332S, EGFR I646L, EGFR T678M, EGFR P753S, EGFR E922K, EGFR A1118T, EPHA2 R315Q, EPHA2 H333R, EPHA2 G391R, EPHA2 P460L, EPHA2 H609Y, EPHA2 M631T, EPHA2 G662S, EPHA2 V747I, EPHA2 L836R, EPHA2 E911K, EPHA2 V936M, EPHA2 R950 W, EPHA3 S46F, EPHA3 E53K, EPHA3 A777G, EPHA4 V234F, EPHA4 5803A, EPHA4 M877V, EPHA5 N81T, EPHA5 E85K, EPHA5 A672T, EPHA5 V891L, EPHA5 A957T, EPHA5 R981L, EPHA6 N291H, EPHA6 G513E, EPHA6 L622F, EPHB1 A39V, EPHB1 I837M, EPHB2 A83V, EPHB2 S98R, EPHB2 V136M, EPHB2 R270Q, EPHB2 P273L, EPHB2 R369Q, EPHB2 E686K, EPHB2 V762L, EPHB3 P6del, EPHB3 A517V, EPHB4 P231S, EPHB4 V547M, EPHB4 D576G, EPHB4 I610T, EPHB4 E890D, EPHB4 A955V, EPHB6 G353_E471del, EPHB6 A369T, EPHB6 L580F, EPHB6 E615K, EPHB6 A647V, EPHB6 S785R, EPHB6 R811C, FAK S3291, FAK Q440R, FAK A472V, FAK P901S, FER I240T, FER Q526L, FER Q599R, FES M323V, FES L690M, FES V724M, FGFR1 R78H, FGFR1 P252S, FGFR1 A268S, FGFR1 G539_K540del, FGFR21526T, FGFR4 Y367C, FLT3 V194M, FLT3 D358V, FLT3 V557I, FLT3 G757E, FLT3 R849H, FRK R64Q, FRK G119A, FRK R406H, FYN E521K, HER2 G518V, HER2 A830V, HER2 E930D, HER2 G1015E, HER2 A1216D, HER3 N126K, HER3 R611W, HER3 R667H, HER3 R1077W, HER3 R1089W, HER3 P1142H, HER3 L1177I, HER4 L753V, HER4 G936R, IGF1R T104M, IGF1R Y201H, IGF1R N209S, INSR L9911, ITK R448H, JAK1 I363V, JAK1 R494C, JAK1 N849fsX16, JAK2 F85S, JAK2 A377E, JAK2 L383P, JAK2 G571S, JAK2 E592K, JAK2 R1063H, JAK2 N1108S, JAK3 G62fsX47, JAK3 M511I, JAK3 P693L, JAK3 E698K, LCK L36fsX8, LCK F151S, LCK R484W, LMTK2 Q238P, LMTK2 A251T, LMTK2 G518V, LMTK2 D523Y, LMTK2 M758V, LMTK2 D793G, LMTK2 R828Q, LMTK2 L879M, LMTK2 A1008V, LYN F130V, MER E831Q, MET T171, MET P366S, MET S691L, NTRK1 P453fsX15, NTRK1 L585fsX73, NTRK1 G595E, NTRK1 R748W, NTRK2 A586V, NTRK2 V622I, NTRK2 A647fsX54, NTRK3 V530fsX6, NTRK3 G608D, NTRK3 A631fsX33, PDGFRA G79D, PTK-9 D258E, PTK-9 K265R, PTK-9 N333S, PYK2 S9I, PYK2 C395Y, PYK2 E404Q, PYK2 D424Y, PYK2 E798Q, PYK2 M885L, PYK2 T978M, RET A750T, RON F574fsX23, RON Q955H, RON A1022_K1090del, RON V1070fsX12, ROR1 R185H, ROR1 R429Q, ROR1 S870I, ROR1 P883S, ROR2 R302H, ROR2C389R, ROR2 D390fsX46, ROR2 P548S, ROS R187M, ROS D709fsX16, ROS Q865fsX90, ROS A1443S, RYK H250R, RYK R504H, RYK A559T, SYK M34fsX3, SYK I262L, SYK E315K, SYK A353T, SYK R520S, SYK V622A, TEC L89R, TEC W531R, TEC P587L, TEK A615T, TEK A1006T, TIE S470L, TIE M871T, TNK1 A299D, TYK2 A53T, TYK2 S340fsX26, TYK2 R701T, TYK2 D883N, TYK2 R901Q, TYK2 A928V, TYK2 P1104A, TYRO3 S324C, TYRO3 E489K, TYRO3 S531L, TYRO3 N788T, TYRO3 P822L, VEGFR1 G203W, VEGFR1 S437L, VEGFR1 A673V, VEGFR1 R781Q, VEGFR1 M938V, VEGFR2 E107K, VEGFR2 P1280S, YES1 K113Q, ZAP70 T155M, and ZAP70 M549V and may be isolated, enriched or purified.

[0191] Also included are kinase variants that are selected from the group consisting of AATYK (AATK), ACK1, AXL, CCK4, EPHA1, EPHA2, EPHA3, EPHB3, FAK, FES, HER2, LMTK2 (AATYK2/BREK), MATK, MER, NTRK3, PDGRFA, PDGFRB, PTK-9, PYK2, RON, ROS, RYK, TEK, TNK1, TXK, TYK2, VEGFR1, VEGFR2, VEGFR3, and ZAP70 and including at least one of the germline alterations AATYK G600C, AATYK G641S, AATYK F1163S, AATYK T1227M, ACK1 P725L, AXL G517S, CCK4 P693L, CCK4 A777V, CCK4 S795R, EPHA1 S936L, EPHA2 R876H, EPHA3 I564V, EPHB3 R514Q, FAK L926delinsPWRL, FES P397R, FES S72_K129del, FES E413fsX131, HER2 R1161Q, LMTK2 S910I, MATK A496T, MER E823Q, NTRK3 E402_F410delinsV, NTRK3 G466_Y529delinsD, NTRK3 R711_V712ins16, PDGFRA L221F, PDGFRA S478P, PDGFRB T464M, PTK-9 E195_V196insRPEDHIG, PYK2 G414V, RON Q473_D515del, RON R627fsX23, RON R813_C814insQ, ROS C76fsX, RYK F516L, TEK V600L, TNK1 D472_R473del, TNK1 M598fsX5, TXK R63C, TXK Y414fsX15, TYK2 E971fsX67, VEGFR1 Y642H, VEGFR1 E982A, VEGFR1 P1201L, VEGFR2 C482R, VEGFR3 R1321Q and ZAP70 K186fsX. These kinase variants may also be isolated, enriched or purified.

[0192] By “isolated” in reference to a polypeptide is meant a polymer of amino acids (2 or more amino acids) conjugated to each other, including polypeptides that are isolated from a natural source or that are synthesized. The isolated polypeptides of the present invention are unique in the sense that they are not found in a pure or separated state in nature. Use of the term “isolated” indicates that a naturally occurring sequence has been removed from its normal cellular environment. Thus, the sequence may be in a cell-free solution or placed in a different cellular environment. The term does not imply that the sequence is the only amino acid chain present, but that it is essentially free (about 90-95% pure at least) of non-amino acid material naturally associated with it.

[0193] By the use of the term “enriched” in reference to a polypeptide is meant that the specific amino acid sequence constitutes a significantly higher fraction (2-5 fold) of the total amino acid sequences present in the cells or solution of interest than in normal or diseased cells or in the cells from which the sequence was taken. This could be caused by preferential reduction in the amount of other amino acid sequences present, or by a preferential increase in the amount of the specific amino acid sequence of interest, or by a combination of the two. However, it should be noted that enriched does not imply that there are no other amino acid sequences present. The term merely defines that the relative amount of the sequence of interest has been significantly increased. The term significant here is used to indicate that the level of increase is useful to the person making such an increase, and generally means an increase relative to other amino acid sequences of about at least 2-fold, for example at least about 5- to 10-fold or even more. The term also does not imply that there is no amino acid sequence from other sources. The other source of amino acid sequences may, for example, include amino acid sequence encoded by a yeast or bacterial genome, or a cloning vector. The term is meant to cover only those situations in which man has intervened to increase the proportion of the desired amino acid sequence.

[0194] It is also advantageous for some purposes that an amino acid sequence be in purified form. The term “purified” in reference to a polypeptide does not require absolute purity (such as a homogeneous preparation); instead, it represents an indication that the sequence is relatively purer than in the natural environment. Compared to the natural level this level should be at least 2-5 fold greater (e.g., in terms of mg/ml). Purification of at least one order of magnitude, such as about two or three orders, including for example about four or five orders of magnitude is expressly contemplated. It may be desired to obtain the substance at least essentially free of contamination at a functionally significant level, for example about 90%, about 95%, or 99% pure.

[0195] Explicitly falling within the scope of the present invention are fragments of mutant kinase polypeptides with any one of the amino acid sequences set forth in SEQ ID Nos: 1-256, or the corresponding full-length amino acid sequences thereof, as long as said fragments include one of the mutations set forth in FIG. 32. The mutant kinase polypeptide fragments contain at least 30, 35, 40, 45, 50, 60, 100, 200, or 300 contiguous amino acids of SEQ ID Nos: 1-256, provided that the mutation of interest is included in said protein fragment.

[0196] Also encompassed by the present invention are kinase variants with any one of the amino acid sequences set forth in SEQ ID Nos: 513-516, 519, 524-525, 527-528, 533, 537-538, 543, 547-550, 562, 571-573, 583-587, 589-591, 598, 600-601, 607, 616, 620-621, 623-624, 626, 630, 632-634, 637, and 640-641 and fragments thereof, as long as said fragment include the alteration indicated in FIG. 33. Such fragments may have a length of at least 30, 35, 40, 45, 50, 60, 100, 200, or 300 contiguous amino acids of SEQ ID Nos: 513-516, 519, 524-525, 527-528, 533, 537-538, 543, 547-550, 562, 571-573, 583-587, 589-591, 598, 600-601, 607, 616, 620-621, 623-624, 626, 630, 632-634, 637, and 640-641 with the proviso that said fragment includes the altered sequence position or region.

[0197] In case a mutation or polymorphism leads to a premature stop codon, the mutated or altered kinase may be even shorter than 30 amino acids. However, such mutants and variants are also considered to fall within the scope of the present invention.

[0198] Also intended to fall within the scope of the present invention, are splice variants of the above mutant kinase polypeptides. Said splice variants may significantly differ from the above amino acid sequences, however, the functional domain architecture, for example the kinase domain, as well as the mutated region have to be retained in such variants. Such splice variants may lead to isoforms of the mutated kinase or kinase variant and may differ from the known form, for example, by an extended or shortened C- or N-terminus or the insertion or deletion of an amino acid sequence stretch. However, the sequence homology and sequence identity between the splice variants/isoforms is sufficiently high so that the skilled person is readily aware that the kinase in question is a mere isoform and not another kinase of the same family. Due to differing lengths of the isoforms, the mutated or altered position may be conserved but the numbering may be changed.

[0199] By “fragment” in reference to a polypeptide is meant any amino acid sequence present in a kinase polypeptide, as long as it is shorter than the full length sequence and includes the alteration to be detected.

[0200] A variety of methodologies known in the art can be utilized to obtain the polypeptides of the present invention. The polypeptides may be purified from tissues or cells that naturally produce the polypeptides. Alternatively, the above-described isolated nucleic acid fragments could be used to express the recombinant kinase polypeptides of the invention in any organism.

[0201] By “recombinant kinase polypeptide” is meant a polypeptide produced by recombinant DNA techniques such that it is distinct from a naturally occurring polypeptide either in its location (e.g., present in a different cell or tissue than found in nature), purity or structure. Generally, such a recombinant polypeptide will be present in a cell in an amount different from that normally observed in nature.

[0202] Any eukaryotic organism can be used as a source for the polypeptides of the invention, as long as the source organism naturally contains such polypeptides. As used herein, “source organism” refers to the original organism from which the amino acid sequence of the subunit is derived, regardless of the organism the subunit is expressed in and ultimately isolated from.

[0203] As a further alternative the polypeptides of the invention may be synthesized using an automated polypeptide synthesizer.

[0204] One skilled in the art can readily follow known methods for isolating proteins in order to obtain the polypeptides free of natural contaminants. These include, but are not limited to: size-exclusion chromatography, HPLC, ion-exchange chromatography, and immuno-affinity chromatography.

V. Antibodies, Methods of their Use and Kits for the Detection of Mutant Kinase Polypeptides

[0205] Also encompassed by the invention are antibodies having specific binding affinity only for a mutant kinase polypeptide, or domain or fragment thereof, with the mutant kinase polypeptide being selected from the group consisting of AATYK (AATK), ABL1, ACK1, ALK, ARG, AXL, BMX, BRK, BTK, CCK4, CSK, DDR1, DDR2, EGFR, EPHA2, EPHA3, EPHA4, EPHA5, EPHA6, EPHB1, EPHB2, EPHB3, EPHB4, EPHB6, FAK, FER, FES, FGFR1, FGFR2, FGFR4, FLT3, FRK, FYN, HER2, HER3, HER4, IGF1R, INSR, ITK, JAK1, JAK2, JAK3, LCK, LMTK2 (AATYK2/BREK), LYN, MER, MET, NTRK1, NTRK2, NTRK3, PDGRFA, PTK-9, PYK2, RET, RON, ROR1, ROR2, ROS, RYK, SYK, TEC, TEK, TIE, TNK1, TYK2, TYRO3, VEGFR1, VEGFR2, YES1, and ZAP70 and including at least one of the mutations AATYK F1195C, ABL1 G417E, ABL1 N789S, ABL1 G883fsX12, ACK1 H37Y, ACK1 E111K, ACK1 R127H, ACK1 M393T, ACK1 A634T, ACK1 S699N, ACK1 P731L, ACK1 R748W, ACK1 G947D, ACK1 S985N, ALK G1580V, ARG E332K, ARG V345A, ARG K450R, ARG M657I, ARG P665T, ARG R668C, ARG Q696H, ARG K930R, ARG S968F, ARG Q994H, AXL M569I, AXL M589K, AXL G835V, BMX A150D, BMX S254del, BMX N267I, BRK W78fsX58, BTK M4891, BTK W588C, CCK4 D106N, CCK4 T410S, CCK4 M746L, CCK4 Q913H, CSK Q26X, DDR1 R60C, DDR1 V100A, DDR1 R248W, DDR2M117I, DDR2 R478C, EGFR N115K, EGFR A289V, EGFR P332S, EGFR I646L, EGFR T678M, EGFR P753S, EGFR E922K, EGFR A1118T, EPHA2 R315Q, EPHA2 H333R, EPHA2 G391R, EPHA2 P460L, EPHA2 H609Y, EPHA2 M631T, EPHA2 G662S, EPHA2 V747I, EPHA2 L836R, EPHA2 E911K, EPHA2 V936M, EPHA2 R950 W, EPHA3 S46F, EPHA3 E53K, EPHA3 A777G, EPHA4 V234F, EPHA4 S803A, EPHA4 M877V, EPHA5 N81T, EPHA5 E85K, EPHA5 A672T, EPHA5 V891L, EPHA5 A957T, EPHA5 R981L, EPHA6 N291H, EPHA6 G513E, EPHA6 L622F, EPHB1 A39V, EPHB1 I837M, EPHB2 A83V, EPHB2 S98R, EPHB2 V136M, EPHB2 R270Q, EPHB2 P273L, EPHB2 R369Q, EPHB2 E686K, EPHB2 V762L, EPHB3 P6del, EPHB3 A517V, EPHB4 P231S, EPHB4 V547M, EPHB4 D576G, EPHB4 I610T, EPHB4 E890D, EPHB4 A955V, EPHB6 G353_E471del, EPHB6 A369T, EPHB6 L580F, EPHB6 E615K, EPHB6 A647V, EPHB6 S785R, EPHB6 R811C, FAK S329I, FAK Q440R, FAK A472V, FAK P901S, FER I240T, FER Q526L, FER Q599R, FES M323V, FES L690M, FES V724M, FGFR1 R78H, FGFR1 P252S, FGFR1 A268S, FGFR1 G539_K540del, FGFR21526T, FGFR4 Y367C, FLT3 V194M, FLT3 D358V, FLT3 V5571, FLT3 G757E, FLT3 R849H, FRK R64Q, FRK G119A, FRK R406H, FYN E521K, HER2 G518V, HER2 A830V, HER2 E930D, HER2 G1015E, HER2 A1216D, HER3 N126K, HER3 R611W, HER3 R667H, HER3 R1077W, HER3 R1089W, HER3 P1142H, HER3 L1177I, HER4 L753V, HER4 G936R, IGF1R T104M, IGF1R Y201H, IGF1R N209S, INSR L991I, ITK R448H, JAK1 I363V, JAK1 R494C, JAK1 N849fsX16, JAK2 F85S, JAK2 A377E, JAK2 L383P, JAK2 G571S, JAK2 E592K, JAK2 R1063H, JAK2 N1108S, JAK3 G62fsX47, JAK3 M511I, JAK3 P693L, JAK3 E698K, LCK L36fsX8, LCK F151S, LCK R484W, LMTK2 Q238P, LMTK2 A251T, LMTK2 G518V, LMTK2 D523Y, LMTK2 M758V, LMTK2 D793G, LMTK2 R828Q, LMTK2 L879M, LMTK2 A1008V, LYN F130V, MER E831Q, MET T171, MET P366S, MET S691L, NTRK1 P453fsX15, NTRK1 L585fsX73, NTRK1 G595E, NTRK1 R748W, NTRK2 A586V, NTRK2 V622I, NTRK2 A647fsX54, NTRK3 V530fsX6, NTRK3 G608D, NTRK3 A631fsX33, PDGFRA G79D, PTK-9 D258E, PTK-9 K265R, PTK-9 N333S, PYK2 S91, PYK2 C395Y, PYK2 E404Q, PYK2 D424Y, PYK2 E798Q, PYK2 M885L, PYK2 T978M, RET A750T, RON F574fsX23, RON Q955H, RON A1022_K1090del, RON V1070fsX12, ROR1 R185H, ROR1 R429Q, ROR1 S870I, ROR1 P883S, ROR2 R302H, ROR2 C389R, ROR2 D390fsX46, ROR2 P548S, ROS R187M, ROS D709fsX16, ROS Q865fsX90, ROS A1443S, RYK H250R, RYK R504H, RYK A559T, SYK M34fsX3, SYK I262L, SYK E315K, SYK A353T, SYK R520S, SYK V622A, TEC L89R, TEC W531R, TEC P587L, TEK A615T, TEK A1006T, TIE S470L, TIE M871T, TNK1 A299D, TYK2 A53T, TYK2 S340fsX26, TYK2 R701T, TYK2 D883N, TYK2 R901Q, TYK2 A928V, TYK2 P1104A, TYRO3 S324C, TYRO3 E489K, TYRO3 S531L, TYRO3 N788T, TYRO3 P822L, VEGFR1 G203W, VEGFR1 S437L, VEGFR1 A673V, VEGFR1 R781Q, VEGFR1 M938V, VEGFR2 E107K, VEGFR2 P1280S, YES1 K113Q, ZAP70 T155M, and ZAP70 M549V.

[0206] Furthermore, also included are antibodies having specific binding affinity only for a kinase variant, or domain or fragment thereof, with the kinase variant being selected from the group consisting of AATYK (AATK), ABL1, ACK1, ALK, ARG, AXL, CCK4, CSFR1, EGFR, EPHA1, EPHA10, EPHA2, EPHA3, EPHA7, EPHB2, EPHB3, EPHB4, EPHB6, FAK, FES, FGFR1, FGFR2, FGFR3, FGFR4, FLT3, FRK, FYN, HER2, HER3, JAK2, JAK3, LMTK2 (AATYK2/BREK), MATK, MER, MET, NTRK1, NTRK2, NTRK3, PDGRFA, PDGFRB, PTK-9, PYK2, RET, RON, ROR1, ROR2, ROS, RYK, STYK, TEK, TNK1, TXK, TYK2, TYRO3, VEGFR1, VEGFR2, VEGFR3 and ZAP70 and including at least one of the alterations AATYK G600C, AATYK G641S, AATYK F1163S, AATYK T1227M, ABL1 P829L, ABL1 S991L, ACK1 P725L, ACK1 R1038H, ALK K1491R, ALK D1529E, ARG K959R, AXL G517S, CCK4 P693L, CCK4 E745D, CCK4 A777V, CCK4 S795R, CSF1R H362R, EGFR R521K, EPHA1 A160V, EPHA1 V900M, EPHA1 S936L, EPHA10 L629P, EPHA10 V645I, EPHA10 G749E, EPHA2 R876H, EPHA3 I564V, EPHA3 R914H, EPHA3 W924R, EPHA7 I138V, EPHB2 P128A, EPHB3 R514Q, EPHB4 P231S, EPHB6 G107S, EPHB6 S309A, FAK T416fsX, FAK L926delinsPWRL, FES P397R, FES S72_K129del, FES E413fsX131, FGFR1 V427_T428del, FGFR2 M71T, FGFR2H199_Q247del, FGFR3 T311_Q422del, FGFR4 V10I, FGFR4 L136P, FGFR4 G388R, FLT3 M227T, FRK G122R, FYN D506E, HER2 I655V, HER2 R1161Q, HER2 P1170A, HER3 S1119C, JAK2 L393V, JAK3 P132T, JAK3 P151R, JAK3 V722I, LMTK2 P30A, LMTK2 L780M, LMTK2 S910I, MATK A496T, MER E823Q, MER V8701, MET N375S, MET R988C, MET T1010I, MET V12381, NTRK1 H604Y, NTRK1 G613V, NTRK1 R780Q, NTRK2 D466fsX14, NTRK3 E402_F410delinsV, NTRK3 G466_Y529delinsD, NTRK3 R711_V712ins16, PDGFRA L221F, PDGFRA S478P, PDGFRB P345S, PDGFRB T464M, PTK-9 E195_V196insRPEDHIG, PYK2 G414V, PYK2 K838T, PYK2 V739_R780del, RET D489N, RET G691S, RET R982C, RON N440S, RON R523Q, RON Q473_D515del, RON R627fsX23, RON Y884_Q932del, RON R813_C814insQ, RON R1335G, ROR1 M518T, ROR2 T245A, ROR2 V819I, ROS T145P, ROS R167Q, ROS I537M, ROS S1109L, ROS D2213N, ROS K2228Q, ROS S2229C, ROS C76fsX, RYK N96S, RYK F516L, STYK G204S, TEK P346Q, TEK V486I, TEK V600L, TNK1 D472_R473del, TNK1 M598V, TNK1 M598fsX5, TXK R63C, TXK R336Q, TXK Y414fsX15, TYK2 V362F, TYK2 G363S, TYK2 I684S, TYK2 E971fsX67, TYRO3 I346N, VEGFR1 Y642H, VEGFR1 E982A, VEGFR1 P1201L, VEGFR2 V297I, VEGFR2 Q472H, VEGFR2 C482R, VEGFR2 P1147S, VEGFR3 Q890H, VEGFR3 R1321Q, ZAP70 K186fsX, and ZAP70 P296_S301del.

[0207] By “specific binding affinity” is meant that the antibody binds to the target kinase polypeptide with greater affinity than it binds to other polypeptides under specified conditions. Antibodies or antibody fragments are polypeptides that contain regions that can bind other polypeptides. The term “specific binding affinity” describes an antibody that binds to a mutant kinase polypeptide with significantly greater affinity than it binds to other polypeptides, e.g. the native kinase, under specified conditions.

[0208] The term “polyclonal” refers to antibodies that are heterogenous populations of antibody molecules derived from the sera of animals immunized with an antigen or an antigenic functional derivative thereof. For the production of polyclonal antibodies, various host animals may be immunized by injection with the antigen. Various adjuvants may be used to increase the immunological response, depending on the host species.

[0209] “Monoclonal antibodies” are substantially homogenous populations of antibodies to a particular antigen. They may be obtained by any technique which provides for the production of antibody molecules by continuous cell lines in culture. Monoclonal antibodies may be obtained by methods well known to those skilled in the art (see for example, Köhler et al., Nature 256:495-497 (1975), and U.S. Pat. No. 4,376,110, both of which are hereby incorporated by reference herein in their entirety including any figures, tables, or drawings).

[0210] The term “antibody fragment” refers to a portion of an antibody, often the hypervariable region and portions of the surrounding heavy and light chains that displays specific binding affinity for a particular molecule. A hypervariable region is a portion of an antibody that physically binds to the polypeptide target.

[0211] The term “domain” refers to a region of a polypeptide which contains a particular function. For instance, N-terminal or C-terminal domains of signal transduction proteins can serve functions including, but not limited to, binding molecules that localize the signal transduction molecule to different regions of the cell or binding other signaling molecules directly responsible for propagating a particular cellular signal. Some domains can be expressed separately from the rest of the protein and function by themselves, while others must remain part of the intact protein to retain function. The latter are termed functional regions of proteins and also relate to domains.

[0212] An antibody of the invention may be isolated by comparing its binding affinity to a mutant kinase or kinase variant of the invention with its binding affinity to other polypeptides. Those which bind selectively to a mutant kinase or kinase variant of the invention would be chosen for use in methods requiring a distinction between a kinase of the invention and other polypeptides. Such methods could include, but should not be limited to, the analysis of altered kinase expression in tissue containing other polypeptides.

[0213] The mutant kinases and kinase variants of the present invention can be used in a variety of procedures and methods, such as for the generation of antibodies and for use in identifying pharmaceutical compositions. One skilled in the art will recognize that if an antibody is desired, a mutant kinase or kinase variant according to the invention could be generated as described herein and used as an immunogen. The antibodies of the present invention include monoclonal and polyclonal antibodies, as well fragments of these antibodies, and humanized forms. Humanized forms of the antibodies of the present invention may be generated using one of the procedures known in the art such as chimerization or CDR grafting.

[0214] In general, techniques for preparing monoclonal antibodies and hybridomas are well known in the art. Any animal (mouse, rabbit, and the like) which is known to produce antibodies can be immunized with the selected polypeptide. Methods for immunization are well known in the art. Such methods include subcutaneous or intraperitoneal injection of the polypeptide. One skilled in the art will recognize that the amount of polypeptide used for immunization will vary based on the animal which is immunized, the antigenicity of the polypeptide and the site of injection.

[0215] The polypeptide may be modified or administered in an adjuvant in order to increase the peptide antigenicity. Methods of increasing the antigenicity of a polypeptide are well known in the art. Such procedures include coupling the antigen with a heterologous protein (such as globulin or β-galactosidase) or through the inclusion of an adjuvant during immunization.

[0216] For monoclonal antibodies, spleen cells from the immunized animals are removed, fused with myeloma cells, such as SP2/0-Ag14 myeloma cells, and allowed to become monoclonal antibody producing hybridoma cells. Any one of a number of methods well known in the art can be used to identify the hybridoma cell which produces an antibody with the desired characteristics. These include screening the hybridomas with an ELISA assay, western blot analysis, or radioimmunoassay (Lutz et al., Exp. Cell Res. 175:109-124, 1988). Hybridomas secreting the desired antibodies are cloned and the class and subclass are determined using procedures known in the art.

[0217] For polyclonal antibodies, antibody-containing antisera is isolated from the immunized animal and is screened for the presence of antibodies with the desired specificity using one of the above-described procedures. The above-described antibodies may be detectably labeled. Antibodies can be detectably labeled through the use of radioisotopes, affinity labels (such as biotin, avidin, and the like), enzymatic labels (such as horse radish peroxidase, alkaline phosphatase, and the like) fluorescent labels (such as FITC or rhodamine, and the like), paramagnetic atoms, and the like. Procedures for accomplishing such labeling are well-known in the art, for example, see Sternberger et al., J. Histochem. Cytochem. 18:315, 1970; Bayer et al., Meth. Enzym. 62:308-, 1979; Engval et al., Immunol. 109:129-, 1972; Goding, J. Immunol. Meth. 13:215-, 1976. The labeled antibodies of the present invention can be used for in vitro, in vivo, and in situ assays to identify cells or tissues which express a specific peptide.

[0218] The above-described antibodies may also be immobilized on a solid support. Examples of such solid supports include plastics such as polycarbonate, complex carbohydrates such as agarose and sepharose, acrylic resins and such as polyacrylamide and latex beads. Techniques for coupling antibodies to such solid supports are well known in the art. The immobilized antibodies of the present invention can be used for in vitro, in vivo, and in situ assays as well as in immunochromatography.

[0219] The present invention also relates to a method of detecting a mutant kinase polypeptide or kinase variant in a sample, including: (a) contacting the sample with an above-described antibody, under conditions such that immunocomplexes form, and (b) detecting the presence of said antibody bound to the polypeptide. In detail, the methods include incubating a test sample with one or more of the antibodies of the present invention and assaying whether the antibody binds to the test sample. The presence of a mutant kinase or kinase variant of the invention in a sample may indicate disease.

[0220] Conditions for incubating an antibody with a test sample vary. Incubation conditions depend on the format employed in the assay, the detection methods employed, and the type and nature of the antibody used in the assay. One skilled in the art will recognize that any one of the commonly available immunological assay formats (such as radioimmunoassays, enzyme-linked immunosorbent assays, diffusion based Ouchterlony, or rocket immunofluo-rescent assays) can readily be adapted to employ the antibodies of the present invention.

[0221] The immunological assay test samples of the present invention include cells, protein or membrane extracts of cells, or biological fluids such as blood, serum, plasma, or urine. The test samples used in the above-described method will vary based on the assay format, nature of the detection method and the tissues, cells or extracts used as the sample to be assayed.

[0222] Methods for preparing protein extracts or membrane extracts of cells are well known in the art and can be readily be adapted in order to obtain a sample which is testable with the system utilized.

[0223] Diagnostic kits for performing such methods may contain all the necessary reagents to carry out the previously described methods of detection. The kit may include antibodies or antibody fragments specific for the mutant kinase or kinase variant as well as a conjugate of a binding partner of the antibodies or the antibodies themselves. Diagnostic kits for performing such methods may be constructed to include a first container containing the antibody and a second container having a conjugate of a binding partner of the antibody and a label, such as, for example, a radioisotope. In another embodiment, the kit further includes one or more other containers including one or more of the following: wash reagents and reagents capable of detecting the presence of bound antibodies.

[0224] Examples of detection reagents include, but are not limited to, labeled secondary antibodies, or in the alternative, if the primary antibody is labeled, the chromophoric, enzymatic, or antibody binding reagents which are capable of reacting with the labeled antibody. The compartmentalized kit may be as described above for nucleic acid probe kits. One skilled in the art will readily recognize that the antibodies described in the present invention can readily be incorporated into one of the established kit formats which are well known in the art.

VI. Exemplary Protein Kinase Mutants and of the Invention and their Use

[0225] In one aspect the present invention relates to an isolated, enriched, or purified nucleic acid molecule that encodes a mutant of a protein kinase polypeptide with the protein kinase polypeptide being one of FGFR4, FGFR1, Tyro3, TEC, CSK and Ack1.

[0226] FGFR1 and FGFR4 are members of the fibroblast growth factor transmembrane receptor family. FGF-receptors stimulate growth of many cell types and are inter alia involved in tissue repair, wound healing and angiogenesis. The FGF receptors include a vatiety of splice variants. Each receptor and receptor splice variant is activated by a unique set of fibroblast growth factors (see Powers, C. M., et al., Endocr. Relat. Cancer 7:165-197 (2000), incorporated herein by reference in its entirety). Cellular signaling pathways by FGF receptors have recently been reviewed by Eswarakumar et al (Cytokine & Growth Factor Reviews 16, 139-149 (2005), incorporated herein by reference in its entirety). Fibroblast growth factor receptors are known to activate the Ras-MAPK, the PLCγ-PKC, the PI3K-Akt and the p38 MAPK pathways. They are also known to play a role in tumor development and progression. FGFR1 and FGFR4 are overexpressed in clinical prostate cancer and suppression of FGFR4 expression blocks prostate cancer proliferation (Sahadevan, K., et al. J. Pathology 213: 82-90 (2007), incorporated herein by reference in its entirety).

[0227] In one aspect the invention relates to a nucleic acid molecule that encodes FGFR4 Y367C. This nucleic acid accordingly encodes an FGFR protein that has at position 367 Cysteine rather than Tyrosine, as would be the case for the wild type protein. This amino acid is highly conserved throughout the FGFR family and located within the extracellular domain of the receptor. The amino acid exchange may facilitate receptor dimerization, thereby augmenting receptor activation and resulting in a basal receptor activation.

[0228] The present inventors have further identified an amino acid exchange at position 388 of FGFR4 as a single nucleotide polymorphism that is highly represented in Asian HCC patients compared to the Caucasian population. A respective protein has Arginine instead of Glycine at position 388. Furthermore, the homozygous genotype encoding Arginine at position 388 correlates with an increased secretion of a diagnostic marker for hepatocellular carcinoma.

[0229] In another aspect the invention also relates to a nucleic acid molecule that encodes FGFR1 P252S. Amino acid position 252 is highly conserved. The present inventors found a heterozygous exchange in the melanoma cell line MeWo in this position. This amino acid change may lead to receptor activation by influencing ligand binding. Without being bound by theory it is believed that the presence of a serine residue, providing a hydroxyl group, is likely to induce the formation of additional hydrogen bonds.

[0230] Tyro3, another receptor protein-tyrosine kinase, is a member of the Axl family, the members of which play an important role in spermatogenesis, immunoregulation, and phagocytosis. Tyro3 proteins are also known to be essential for mammalian development. The crystal structure of the N-terminal Ig domain pair of Tyro3 has been reported by Heiring et al. (J. Biol. Chem., 279, 8, 6952-6958, (2004)). In one aspect the invention relates to a nucleic acid molecule that encodes Tyro3 P822L. This nucleic acid accordingly encodes a Tyro 3 protein that has at position 822 Leucine rather than Proline, as would be the case for the wild type protein.

[0231] The present inventors observed that overexpression of Tyro3 in HEK293 cells confers resistance to apoptosis upon treatment with TNFα/actinomycin-D. Furthermore, overexpression of mutants S531L and P822L instead of wildtype Tyro3 enhanced anti-apoptotic effects. Tyro3 may perturb mitochondrial apoptotic signaling through the modulation of BCL2 family members. The present invention thus relates to the detection of Tyro3 expression, and particularly the occurrence of mutants S531L and P822L as genetic markers for chemoresistance. Inhibitors of Tyro3 signaling may be a promising adjuvant with other Chemotherapeutic agents.

[0232] In a further aspect the invention also relates to a nucleic acid molecule that encodes TEC L89R, TEC W531R or TEC P587L. The first of these nucleic acids accordingly encodes a TEC protein that has at position 89 Arginine rather than Leucine, as would be the case for the wild type protein. This exchange is located in the pleckstrin homology domain of TEC. The second of these nucleic acids accordingly encodes a TEC protein that has at position 531 Arginine rather than Tryptophan, as would be the case for the wild type protein. This exchange is located in the kinase domain of TEC. The third of these nucleic acids encodes a TEC protein that has at position 587 Leucine rather than Proline, as would be the case for the wild type protein. This exchange is located in the kinase domain of TEC, too. The inventors have identified the corresponding proteins, encoded by these nucleic acids, as showing a decreased tyrosine phosphorylation compared to the wild type protein (see FIG. 17). Furthermore, the corresponding proteins are not able to activate MAPK signaling (FIG. 19), c-fos (FIG. 20) and Stat3 (FIG. 21).

[0233] TEC is a member of a family of intracellular tyrosine kinases of the same name, that includes Txk, Bmx, Itk, and Btk. TEC is involved in cell groth and differentiation and performs an essential role in antigen receptor signaling of T and B lymphocytes. It is important in phospholipase Cγ activation following antigen receptor stimulation. TEC is activated via phosphatidylinositol 3,4,5-trisphosphate generation by phosphatidylinositol 3-kinase (PI 3-kinase), and trans-phosphorylation by a Src family PTK, which activates the kinase domain of the protein. TEC is also involved in cytoskeleton reorganization by increasing actin polymerization and formation of stress fibers. The solution structure of the TEC Src homology 3 domain, which mediates interactions with proline-rich sequences (including in an intramolecular manner), was determined using NMR spectroscopy by Pursglove et al. (J. Biol. Chem., 277, 1, 755-762 (2002)). A tyrosine within this domain is phosphorylated during T cell signaling, a mechanism that depends on SH2-mediated interactions with the kinase domain (Joseph, R. E., Biochemistry, 46, 18, 5595-5603 (2007)). TEC is known to to signal constitutively when over-expressed in lymphocyte cell lines.

[0234] Tyrosine kinase 2 (Tyk2) is a Janus kinase transducing signals of cytokines. Tyk2 is known to play an important role in IFN-induced apoptosis of pro-B cells. Tyk2 is constitutively tyrosine phosphorylated in the leukemogenic cell line RH/K34 (Samaana, A., & Mahana, W., Immunology Letters 109, 2, 113-119 (2007)). Tyk2 has been shown to be play an important role in urokinase-type plasminogen activator-induced prostate cancer cell invasion Ode, H., et al., Biochem. Biophys. Res. Commun. doi:10.1016/j.bbrc.2007.08.160 (2007), incorporated herein by reference in its entirety). The present inventors identified a differential occurrence of TYK2 F362 allele carriers in tumor cell lines (FIG. 4B) with an under-representation of the TYK2 F362 allele in control samples. These data indicate a tumor-promoting function, including a cancer-promoting function, of TYK2 F362. Illustrative examples of a respective tumor include, but are not limited to, leukemia, melanoma, and glioma. The present invention thus also relates to the detection of TYK2 F362.

[0235] Ack1 is a nonreceptor tyrosine kinase that binds exclusively to activated Cdc42-GTP, a Rho family small G protein, but not to Rac or Rho (for an investigation on its biochemical properties see e.g. Yokoyama, N. et al., J. Biol. Chem., 278, 48, 47713-47723). Ack1 hass a kinase domain, an SH3 domain, a Cdc42/Rac-interactive binding (CRIB) domain, and a proline-rich C terminus. The C terminus has been shown to be involved in the interaction with the epidermal growth factor receptor (Shen, F., et al., Molecular Biology of the Cell, 18, 732-742 (2007), incorporated herein by reference in its entirety). Ack1 is Tyrosine phosphorylated by signaling via growth factors, cell adhesion, and muscarinic receptors. Ack1 has been shown to play an important role in cancer cell survival, as well as in tumor formation and metastasis (Mahajan, N. P., et al., Cancer Research 65, 10514-10523 (2005); van der Horst, E. H., Proc. Natl. Acad. Sci. U.S.A. 102, 44, 15901-15906 (2005)). MacKeigan et al. (Nat. Cell Biol. 7, 591-600 (2005)) identified Ack1 as an anti-apoptotic gene in an RNAi screen. Sustained activation of Ack-1 has been reported to be tumorigenic (Mahajan, 2005, supra; Mahajan, N. P., et al., Proc. Natl. Acad. Sci. U.S.A. 104, 20, 8438-8443 (2007), incorporated herein by reference in its entirety). Ack1 has also been shown to include an ubiquitin association domain at its C-terminus where it is ubiquitinylated and leading to its proteosomal degradation (Shen et al., 2007, supra). The present inventors show that the somatic variant of Ack1, that has at position 985 Serine rather than Asparagin, as would be the case for the wild type protein, is less sensitive to ubiquitination, suggesting the stabilization of this oncogenic kinase.

[0236] In this regard the invention also provides a method of identifying a cell having a predisposition to turn tumorigenic, including to transform into a cancer cell. The cell may in some embodiments be derived from an organism such as a mammal, a fish, an amphibian, or a bird. Examples of a mammal include, but are not limited to, a rat, a mouse, a rabbit, a Guinea pig, an opossum, a dog, a cat, a chimpanzee, a rhesus monkey, a cattle (cow), a marmoset and a human. The cell may for example be cultured. The cell may also be included in an organism such as a mammal (see above for examples), a fish, an amphibian, or a bird. In such embodiments the method may be or may be included in diagnosing the risk of developing a neoplasm in a subject. It may be or be included in diagnosis of a tumor such as cancer.

[0237] A respective method may include identifying the amino acid at position 367 of the expressed protein kinase FGFR4. The presence of Cysteine at position 367 indicates an increased predisposition to turn tumorigenic, including to transform into a cancer cell. A respective method may also include identifying the amino acid at position 388 of the expressed protein kinase FGFR4. The presence of Arginine at position 388 instead of Glycine indicates an increased predisposition to turn tumorigenic, including to transform into a cancer cell. In some embodiments such a cell is a liver cell. In some embodiments a method where the amino acid at position 388 of the expressed protein kinase FGFR4 is identified, the genotype of the gene encoding the FGFR4 receptor in the cell is further determined. A homozygous genotype FGFR4 388Arg, i.e. where the cell is homozygously encoding FGFR4 with Arginine at position 388, indicates an increased predisposition to transform into a cancer cell.

[0238] A respective method may also include identifying the amino acid at position 252 of the expressed protein kinase FGFR1. The presence of Serine at position 252 instead of Proline indicates an increased predisposition to turn tumorigenic, including to transform into a cancer cell. A respective method may also include identifying the amino acid at position 388 of the expressed protein kinase FGFR4. Such a cell is typically a hepatocyte. The presence of Arginine at position 388 instead of Glycine indicates an increased predisposition to transform into a hepatocellular carcinoma cell. A respective method may also include identifying the amino acid at position 531 and/or 822 of the expressed protein kinase Tyro3. The presence of Leucine at position 531 instead of Serine and/or the presence of Leucine at position 822 instead of Proline indicates an increased predisposition to turn tumorigenic, including to transform into a cancer cell. A respective method may also include identifying the amino acid at position 89 of the expressed protein kinase TEC. The presence of Arginine at position 89 instead of Leucine indicates an increased predisposition to turn tumorigenic, including to transform into a cancer cell. In some embodiments such a cell is a stomach cell. A respective method may also include identifying the amino acid at position 531 of the expressed protein kinase TEC. The presence of Arginine at position 531 instead of Tryptophan indicates an increased predisposition to turn tumorigenic, including to transform into a cancer cell. In some embodiments such a cell is a T cell. A respective method may also include identifying the amino acid at position 587 of the expressed protein kinase TEC. The presence of Leucine at position 587 instead of Proline indicates an increased predisposition to turn tumorigenic, including to transform into a cancer cell. In some embodiments such a cell is a lung cell. Such a method may also include identifying the amino acid at position 362 of the expressed protein kinase TYK2. The presence of Phenylalanine at position 362 instead of Valine indicates an increased predisposition to turn tumorigenic, including to transform into a cancer cell. In some embodiments such a cell is a brain cell or a cell of the hematopoietic/lymphoid system. A respective method may also include identifying the amino acid at position 26 of the expressed protein kinase C-terminal Src kinase (CSK). The presence of an amino acid different from Glutamine at position 26 indicates an increased predisposition to turn tumorigenic, including to transform into a cancer cell. In some embodiments such a cell is a colon cell. A respective method may also include identifying the amino acid at position 985 of the expressed protein kinase Ack1. The presence of Asparagine at position 985 instead of Serine indicates an increased predisposition to turn tumorigenic, including to transform into a cancer cell. In some embodiments such a cell is a kidney cell.

[0239] A method of identifying a cell that has a predisposition to turn tumorigenic, including to transform into a cancer cell, may be used in combination with any other diagnostic or prognostic method, e.g. a method of cancer prognosis or diagnosis. As an illustrative example, where the cell of interest is a liver cell, the level of the marker protein alpha-fetoprotein may be determined (see above and below). The method of the invention may also be combined with any other desired method. In some embodiments a method according to the present invention may be combined with detecting the expression of one or more marker genes of the respective tissue type of the cell in question. Any such combination may also be carried out with a respective method of identifying a cell that is resistant to apoptosis inducing reagents (see below).

[0240] In this regard the invention further provides a method of identifying a cell that is resistant to apoptosis inducing reagents, i.e. a cell that is chemoresistant. A respective method may include measuring in the cell the expression of the protein kinase Tyro3. Such a method further includes comparing the result of the measurement obtained with the result of a control measurement. An increased expression of protein kinase Tyro3 indicates resistance of the cell to apoptosis inducing reagents. A respective method may include identifying the amino acid at position 531 of the expressed protein kinase Tyro3. The presence of Leucine at position 531 instead of Serine indicates increased resistance of the cell to apoptosis inducing reagents. A respective method may include identifying the amino acid at position at position 822 of the expressed protein kinase Tyro3. The presence of Leucine at position 822 instead of Proline indicates increased resistance of the cell to apoptosis inducing reagents. Furthermore, a respective method may include identifying the amino acid at position 89 of the expressed protein kinase TEC. The presence of Arginine at position 89 instead of Leucine indicates increased resistance of the cell to apoptosis inducing reagents. In some embodiments the respective cell is a T cell. A respective method may also include identifying the amino acid at position 531 of the expressed protein kinase TEC. The presence of Arginine at position 531 instead of Tryptophan indicates increased resistance of the cell to apoptosis inducing reagents. In some embodiments the respective cell is a T cell. A respective method may include identifying the amino acid at position 587 of the expressed protein kinase TEC. The presence of Leucine at position 587 instead of Proline indicates increased resistance of the cell to apoptosis inducing reagents. In some embodiments the respective cell is a T cell. One of the amino acid exchanges as described above may for instance confer chemoresistance through enhancing antiapoptotic effects in a cell, including a cancer cell. It is understood that any of the methods described above may be combined.

### VII. Identification of Compounds Modulating Mutant Kinase Activity

[0241] Encompassed by the instant disclosure are also methods for the identification of a compound capable of modulating the activity of a mutant protein kinase polypeptide or protein kinase polypeptide variant of the invention. Said mutant kinase polypeptide or protein kinase variant is selected from the ones detailed above.

[0242] The term “kinase activity”, as used herein, may relate to the catalytic activity of a kinase and thus define the rate at which a kinase catalytic domain phosphorylates a substrate. Catalytic activity can be measured, for example, by determining the amount of a substrate converted to a phosphorylated product as a function of time. Catalytic activity can be measured by methods of the invention by holding time constant and determining the concentration of a phosphorylated substrate after a fixed period of time. Phosphorylation of a substrate occurs at the active site of a protein kinase. The active site is normally a cavity in which the substrate binds to the protein kinase and is phosphorylated. The term “kinase activity” may also relate to the binding of a kinase to a natural binding partner that may, but must not include phosphorylation.

[0243] The term “kinase catalytic domain” refers to a region of the protein kinase that is typically 25-300 amino acids long and is responsible for carrying out the phosphate transfer reaction from a high-energy phosphate donor molecule such as ATP or GTP to itself (autophosphorylation) or to other proteins (heterologous phosphorylation). The catalytic domain of protein kinases is made up of 12 subdomains that contain highly conserved amino acid residues, and are responsible for proper polypeptide folding and for catalysis. The catalytic domain can be identified following, for example, a Smith-Waterman alignment of the protein sequence against the non-redundant protein database.

[0244] The term “substrate” as used herein refers to a molecule phosphorylated by a kinase of the invention. Kinases phosphorylate substrates on serine/threonine or tyrosine amino acids. The molecule may be another protein or a polypeptide.

[0245] By “functional” domain is meant any region of the polypeptide that may play a regulatory or catalytic role as predicted from amino acid sequence homology to other proteins or by the presence of amino acid sequences that may give rise to specific structural conformations (i.e. coiled-coils).

[0246] The term “modulates” refers to the ability of a compound to alter the function of a mutated kinase or kinase variant of the invention. A modulator typically activates or inhibits the activity of a mutated kinase or kinase variant of the invention depending on the concentration of the compound exposed to the kinase. In some embodiments the modulator inhibits the activity of a mutated kinase or kinase variant of the invention. The compound may be capable of differentiating between a native and mutant form and/or between the distinct variants of said kinase.

[0247] The term “activates” refers to increasing the cellular activity of the kinase. The term “inhibits” refers to decreasing the cellular activity of the kinase. Kinase activity may be the interaction with a natural binding partner, including phosphorylation.

[0248] The term “modulates” also refers to altering the function of mutant kinases of the invention by increasing or decreasing the probability that a complex forms between the kinase and a natural binding partner. A modulator may increase or decrease the probability that such a complex forms between the kinase and the natural binding partner depending on the concentration of the compound exposed to the kinase. In some embodiments the modulator decreases the probability that a complex forms between the kinase and the natural binding partner.

[0249] The term “complex” refers to an assembly of at least two molecules bound to one another. Signal transduction complexes often contain at least two protein molecules bound to one another. For instance, a protein tyrosine receptor protein kinase, GRB2, SOS, RAF, and RAS assemble to form a signal transduction complex in response to a mitogenic ligand.

[0250] The term “natural binding partner” refers to polypeptides, lipids, small molecules, or nucleic acids that bind to kinases in cells. The natural binding partner may be a nucleotide, such as ATP or GTP or an analogue thereof, or a protein. In some embodiments it is a protein that is involved in signal transduction pathways. A change in the interaction between a kinase and a natural binding partner can manifest itself as an increased or decreased probability that the interaction forms, or an increased or decreased concentration of kinase/natural binding partner complex.

[0251] Such a method includes the steps of: (a) contacting a mutant kinase polypeptide or kinase variant of the invention with a test substance; (b) measuring the activity of said polypeptide; and (c) determining whether said substance modulates the activity of said polypeptide.

[0252] Also within the scope of the invention are methods for the identification of mutant kinase polypeptide or kinase variant modulating compounds in a cell. Said method includes (a) expressing a mutant kinase polypeptide or kinase variant in a cell; (b) adding a test substance to said cell; and (c) monitoring a change in cell phenotype or the interaction between said polypeptide and a natural binding partner.

[0253] In one embodiment, the cells used for such a method are cancer cells, for instance a cancer cell line. Examples for cells that may be suitable for such a method are those identified in the Examples section of the present invention, i.e. the cells in which the mutant kinases or kinase variants were first identified.

[0254] The term “expressing” as used herein refers to the production of mutant kinases or kinase variants of the invention from a nucleic acid vector containing kinase genes within a cell. The nucleic acid vector is transfected into cells using well-known techniques in the art as described herein.

[0255] The invented methods thus also relate to the detection of an agonist or antagonist of mutant kinase or kinase variant activity including incubating cells that produce a mutant kinase of the invention in the presence of a compound and detecting changes in the level of kinase activity. The compounds thus identified would produce a change in activity indicative of the presence of the compound. The compound may be present within a complex mixture, for example, serum, body fluid, or cell extracts. Once the compound is identified it can be isolated using techniques well known in the art.

[0256] The present invention also encompasses a method of agonizing (stimulating) or antagonizing kinase associated activity in a cell and/or in an organism such as a mammal (see below for examples) including administering to said cell and/or organism an agonist or antagonist to a kinase of the invention in an amount sufficient to effect said agonism or antagonism. As an illustrative example a protein kinase inhibitor (see also below) or protein kinase acrivator in form of a synthetic small organic compound may be used for this purpose. Recent overviews on protein kinase inhibitors have for instance been given by Dancey & Sausville (Nature Reviews Drug Discovery 2, 4, 296-313 (2007)), Thaimattam et al. (Current Pharmaceutical Design 13, 2751-2765 (2007)) and Liao (J. Med. Chem. 50, 3, 409-424 (2007)).

[0257] In some embodiments agonizing (stimulating) or antagonizing kinase associated activity in a mammal includes stimulating or reducing the expression or amplification of the respective protein kinase. Methods of stimulating or reducing the expression or amplification of a protein are well known in the art. As an illustrative example, agonizing kinase associated activity may in some embodiments be achieved by expression of a corresponding heterologous kinase. Tissue selective expression of such a heterologous kinase, for example expression only in the liver, may be achieved by using the microRNA present in the respective cell or organism in controlling expression, as described by Brown et al. (Nature Biotechnology doi:10.1038/nbt1372 (2007)).

[0258] As a further illustrative example, in some embodiments of the present method of the invention the expression of the respective protein kinase is reduced by means of a non-coding nucleic acid molecule, such as for example an aptamer or a Spiegelmer® (described in WO 01/92655). A non-coding nucleic acid molecule may also be an nc-RNA molecule (see e.g. Costa, F F, Gene (2005), 357, 83-94 for an introduction on natural nc-RNA molecules). Examples of nc-RNA molecules include, but are not limited to, an anti-sense-RNA molecule, an L-RNA Spiegelmer®, a silencer-RNA molecule (such as the double-stranded Neuron Restrictive Silencer Element), a micro RNA (miRNA) molecule, a short hairpin RNA (shRNA) molecule, a small interfering RNA (siRNA) molecule, a repeat-associated small interfering RNA (rasiRNA) molecule or an RNA that interacts with Piwi proteins (piRNA) (for a brief review see e.g. Lin, H., Science (2007) 316, 397).

[0259] The use of small interfering RNAs has become a tool to “knock down” specific genes. An overview on the differences between the use of synthetic small organic compounds and RNAi has been given by Weiss et al. (Nature Chem. Biol. 3, 12, 739-744 (2007)). Small interfering RNA makes use of gene silencing or gene suppression through RNA interference (RNAi), which occurs at the posttranscriptional level and involves mRNA degradation. RNA interference represents a cellular mechanism that protects the genome. SiRNA molecules mediate the degradation of their complementary RNA by association of the siRNA with a multiple enzyme complex to form what is called the RNA-induced silencing Complex (RISC). The siRNA becomes part of RISC and is targeted to the complementary RNA species which is then cleaved. This leads to the loss of expression of the respective gene (for a brief overview see Zamore, P D, & Haley, B, Science 309, 1519-1524 [2005]). This technique has for example been applied to silencing parasitic DNA sequences, such as the cleavage of HIV RNA, as disclosed in US patent application 2005/0191618.

[0260] A typical embodiment of such a siRNA for the current invention includes an in vitro or in vivo synthesized molecule of 10 to 35 nucleotides, in some embodiments 15 to 25 nucleotides. A respective si-RNA molecule may be directly synthesized within a cell of interest (including a cell that is part of a microorganism and an animal). It may also be introduced into a respective cell and/or delivered thereto. An illustrative example of delivering a siRNA molecule into selected cells in vivo is its non-covalent binding to a fusion protein of a heavy-chain antibody fragment (Fab) and the nucleic acid binding protein protamin (Song, E. et al., Nature Biotech. 23, 6, 709-717 [2005]). In an embodiment of the present invention siRNA molecules are used to induce a degradation of mRNA molecules encoding one or more protein kinases of interest.

[0261] A method of treating diseases in a mammal with a modulator of mutant kinase or kinase variant activity including administering the compound to a mammal in an amount sufficient to modulate mutant kinase or kinase variant associated functions is also encompassed in the present application.

[0262] In an effort to discover novel treatments for diseases, biomedical researchers and chemists have designed, synthesized, and tested molecules that inhibit the function of protein kinases. Some small organic molecules form a class of compounds that modulate the function of protein kinases. Examples of molecules that have been reported to inhibit the function of protein kinases include, but are not limited to, bis monocyclic, bicyclic or heterocyclic aryl compounds (PCT WO 92/20642, published Nov. 26, 1992 by Maguire et al.), vinylene-azaindole derivatives (PCT WO 94/14808, published Jul. 7, 1994 by Ballinari et al.), 1-cyclopropyl-4-pyridyl-quinolones (U.S. Pat. No. 5,330,992), styryl compounds (U.S. Pat. No. 5,217,999), styryl-substituted pyridyl compounds (U.S. Pat. No. 5,302,606), certain quinazoline derivatives (EP Application No. 0 566 266 A1), seleoindoles and selenides (PCT WO 94/03427, published Feb. 17, 1994 by Denny et al.), tricyclic polyhydroxylic compounds (PCT WO 92/21660, published Dec. 10, 1992 by Dow), and benzylphosphonic acid compounds (PCT WO 91/15495, published Oct. 17, 1991 by Dow et al).

[0263] Compounds that can traverse cell membranes and are resistant to acid hydrolysis are potentially advantageous as therapeutics as they can become highly bioavailable after being administered orally to patients. However, many of these protein kinase inhibitors only weakly inhibit the function of protein kinases. In addition, many inhibit a variety of protein kinases and will cause multiple side-effects as therapeutics for diseases.

[0264] Other examples of substances capable of modulating kinase activity include, but are not limited to, indolinones, tyrphostins, quinazolines, quinoxolines, and quinolines. The indolinones, quinazolines, tyrphostins, quinolines, and quinoxolines referred to above include well known compounds such as those described in the literature.

[0265] For example, representative publications describing indolinone compounds include WO 96/22976 (published Aug. 1, 1996 by Ballinari et al.), U.S. patent application Ser. Nos. 08/702,232 and 08/485,323 by Tang et al., and International Patent Publication WO 96/22976 by Ballinari et al.; all of which are incorporated herein by reference in their entirety, including any drawings.

[0266] Publications relating to the use of quinazolines as kinase function modulators include Barker et al., EPO Publication No. 0 520 722 A1; Jones et al., U.S. Pat. No. 4,447,608; Kabbe et al., U.S. Pat. No. 4,757,072; Kaul and Vougioukas, U.S. Pat. No. 5,316,553; Kreighbaum and Corner, U.S. Pat. No. 4,343,940; Pegg and Wardleworth, EPO Publication No. 0 562 734 A1; Barker et al., Proc. of Am. Assoc. for Cancer Research 32:327 (1991); Bertino, J. R., Cancer Research 3:293-304 (1979); Bertino, J. R., Cancer Research 9(2 part 1):293-304 (1979); Curtin et al., Br. J. Cancer 53:361-368 (1986); Fernandes et al., Cancer Research 43:1117-1123 (1983); Ferris et al. J. Org. Chem. 44(2):173-178; Fry et al., Science 265:1093-1095 (1994); Jackman et al., Cancer Research 51:5579-5586 (1981); Jones et al. J. Med. Chem. 29(6):1114-1118; Lee and Skibo, Biochemistry 26(23):7355-7362 (1987); Lemus et al., J. Org. Chem. 54:3511-3518 (1989); Ley and Seng, Synthesis 1975:415-522 (1975); Maxwell et al., Magnetic Resonance in Medicine 17:189-196 (1991); Mini et al., Cancer Research 45:325-330 (1985); Phillips and Castle, J. Heterocyclic Chem. 17(19):1489-1596 (1980); Reece et al., Cancer Research 47(11):2996-2999 (1977); Sculier et al., Cancer Immunol. and Immunother. 23:A65 (1986); Sikora et al., Cancer Letters 23:289-295 (1984); Sikora et al., Analytical Biochem. 172:344-355 (1988); all of which are incorporated herein by reference in their entirety, including any drawings.

[0267] Quinoxalines are, for example, described in Kaul and Vougioukas, U.S. Pat. No. 5,316,553, incorporated herein by reference in its entirety, including any drawings.

[0268] Quinolines are described in Dolle et al., J. Med. Chem. 37:2627-2629 (1994); MaGuire, J. Med. Chem. 37:2129-2131 (1994); Burke et al., J. Med. Chem. 36:425-432 (1993); and Burke et al. BioOrganic Med. Chem. Letters 2:1771-1774 (1992), all of which are incorporated by reference in their entirety, including any drawings.

[0269] Tyrphostins are described in Allen et al., Clin. Exp. Immunol. 91:141-156 (1993); Anafi et al., Blood 82:12:3524-3529 (1993); Baker et al., J. Cell Sci. 102:543-555 (1992); Bilder et al., Amer. Physiol. Soc. pp. 6363-6143:C721-C730 (1991); Brunton et al., Proceedings of Amer. Assoc. Cancer Rsch. 33:558 (1992); Bryckaert et al., Experimental Cell Research 199:255-261 (1992); Dong et al., J. Leukocyte Biology 53:53-60 (1993); Dong et al., J. Immunol. 151(5):2717-2724 (1993); Gazit et al., J. Med. Chem. 32:2344-2352 (1989); Gazit et al., J. Med. Chem. 36:3556-3564 (1993); Kaur et al., Anti-Cancer Drugs 5:213-222 (1994); Kaur et al., King et al., Biochem. J. 275:413-418 (1991); Kuo et al., Cancer Letters 74:197-202 (1993); Levitzki, A., The FASEB J. 6:3275-3282 (1992); Lyall et al., J. Biol. Chem. 264:14503-14509 (1989); Peterson et al., The Prostate 22:335-345 (1993); Pillemer et al., Int. J. Cancer 50:80-85 (1992); Posner et al., Molecular Pharmacology 45:673-683 (1993); Rendu et al., Biol. Pharmacology 44(5):881-888 (1992); Sauro and Thomas, Life Sciences 53:371-376 (1993); Sauro and Thomas, J. Pharm. and Experimental Therapeutics 267(3):119-1125 (1993); Wolbring et al., J. Biol. Chem. 269(36):22470-22472 (1994); and Yoneda et al., Cancer Research 51:4430-4435 (1991); all of which are incorporated herein by reference in their entirety, including any drawings.

[0270] Other compounds that could be used as modulators include oxindolinones such as those described in U.S. patent application Ser. No. 08/702,232 filed Aug. 23, 1996, incorporated herein by reference in its entirety, including any drawings.

[0271] Other substances that modulate the activity of the mutant kinases may include antisense oligonucleotides and antibodies.

### VIII. Methods of Use of the Molecules of the Invention

[0272] The present invention also includes a method for screening for human cells containing a mutant kinase polypeptide or kinase polypeptide variant of the invention or an equivalent sequence. The method involves identifying the mutant kinase polypeptide or kinase variant in human cells using techniques that are routine and standard in the art (e.g., cloning, Southern or Northern blot analysis, in situ hybridization, PCR amplification, etc.).

[0273] Also provided are methods for treating or preventing a disease or disorder by administering to a patient in need of such treatment a substance that modulates the activity of a mutant kinase or kinase variant of the invention. Methods of identifying such compounds have been discussed above. In some embodiments the disease or disorder to be treated or prevented involves an aberrant signal transduction pathway, for example an aberrant kinase function due to a mutation or germline alteration. The disease or disorder to be treated or prevented with the methods of the invention may for example be cancer.

[0274] If the aberrant kinase function is due to a mutation, the mutation can be an activating mutation, i.e. a mutation that leads to the constitutive activation of the kinase. Such a mutation may for example impair the intermolecular or intramolecular regulation of the kinase.

[0275] Alternatively, a germline alteration in a kinase gene, as disclosed and discussed above, may also lead to an altered function of a kinase. This altered function may include deregulation of the kinase, enhanced activity, and increased or decreased sensitivity against natural binding partners or drugs, such as known kinase modulating compounds. Such changes of the function of the kinase by germline alterations may inter alia lead to a predisposition for the development of a proliferative disease, such as cancer, as tumor development and progression naturally depend on an accumulation of a number of aberrations, of which alteration of kinase function may be only one aspect.

[0276] The term “preventing” refers to decreasing the probability that an organism contracts or develops an abnormal condition.

[0277] The term “treating” refers to having a therapeutic effect and at least partially alleviating or abrogating an abnormal condition in the organism.

[0278] The term “administering” relates to a method of incorporating a compound into cells or tissues of an organism.

[0279] The term “signal transduction pathway” refers to the molecules that propagate an extracellular signal through the cell membrane to become an intracellular signal. This signal can then stimulate a cellular response. The polypeptide molecules involved in signal transduction processes are typically protein kinases, more specifically receptor and non-receptor protein tyrosine kinases, serine/threonine kinases and dual specificity kinases. Also involved are typically receptor and non-receptor protein phosphatases, nucleotide exchange factors, and transcription factors. Signal transduction may be mediated via a variety of signaling domains, including but not limited to SRC homology 2 and 3 domains (SH2 and SH3), phosphotyrosine binding domains (PTB), pleckstrin homology domains (PH), proline-rich regions, coiled-coil structures, WW domains, etc., all of which are known to the person skilled in the art.

[0280] The term “therapeutic effect” refers to the inhibition or activation of factors causing or contributing to the abnormal condition. A therapeutic effect relieves to some extent one or more of the symptoms of the abnormal condition.

[0281] The term “aberration” or “aberrant”, in conjunction with the function of a kinase in a signal transduction process, refers to a kinase that is over- or under-expressed in an organism, altered such that its catalytic activity is lower or higher than wild-type protein kinase activity, altered such that it can no longer interact with a natural binding partner, is no longer modified by another protein kinase or protein phosphatase, or no longer interacts with a natural binding partner.

[0282] The abnormal condition caused by a mutant kinase polypeptide or kinase variant of the invention may be prevented or treated when the cells or tissues of the organism exist within the organism or outside of the organism. Cells existing outside the organism can be maintained or grown in cell culture dishes. For cells harbored within the organism, many techniques exist in the art to administer compounds, including (but not limited to) oral, parenteral, dermal, injection, and aerosol applications. For cells outside of the organism, multiple techniques exist in the art to administer the compounds, including (but not limited to) cell microinjection techniques, transformation techniques, and carrier techniques.

[0283] The abnormal condition can also be prevented or treated by administering a compound to a group of cells having an aberration in a signal transduction pathway to an organism. The effect of administering a compound on organism function can then be monitored. The organism may or instance be a mammal, such as a mouse, a rat, a rabbit, a guinea pig, a goat, a monkey or an ape. In some embodiments the organism is a human.

[0284] The term “abnormal condition” refers to a function in the cells or tissues of an organism that deviates from their normal functions in that organism. An abnormal condition can relate to cell proliferation, cell differentiation, or cell survival.

[0285] Abnormal cell proliferative conditions include cancer, fibrotic and mesangial disorders, abnormal angiogenesis and vasculogenesis, wound healing, psoriasis, diabetes mellitus, and inflammation. Furthermore, said proliferative disorders can relate to conditions in which programmed cell death (apoptosis) pathways are abrogated. As a number of protein kinases are associated with the apoptosis pathways, aberrations in the function of any one of the protein kinases could lead to cell immortality.

[0286] Other methods included in the invention are useful for the detection of a mutant kinase polypeptide or kinase variant in a sample as a diagnostic tool for diseases or disorders.

[0287] Such a method may include the steps of: (a) contacting the sample with a nucleic acid probe which hybridizes under hybridization assay conditions to a target region of a nucleic acid encoding a mutant kinase polypeptide or kinase variant of the invention or the complement thereof; and (b) detecting the presence or amount of the probe:target region hybrid as an indication of the disease or disorder.

[0288] The disease or disorder involving a kinase mutant or kinase variant may be a proliferative disease or disorder, for example cancer.

[0289] In some embodiments the nucleic acid probe hybridizes to a mutant kinase target region that encodes at least about 10, about 15, about 20, about 30, about 40, about 50, about 75, about 100, about 150, about 200, about 250, about 300 or about 350 contiguous amino acids of the sequence set forth in SEQ ID NO: 1-256 or 513-642, or the corresponding full-length amino acid sequence, or a functional derivative thereof, with the proviso that the target region includes one of the mutations or alterations set forth in FIGS. 32 and 33. Hybridization conditions should be such that hybridization occurs only with the kinase genes in the presence of other nucleic acid molecules. Under stringent hybridization conditions only highly complementary nucleic acid sequences hybridize. It may be desired to use conditions that prevent hybridization of nucleic acids that have one or more mismatches in a sequence of about 20 contiguous nucleotides.

[0290] The diseases that may be diagnosed by detection of a kinase nucleic acid in a sample may include a cancer. The test samples suitable for nucleic acid probing methods of the present invention include, for example, cells or nucleic acid extracts of cells, or biological fluids. The samples used in the above-described methods will vary based on the assay format, the detection method and the nature of the tissues, cells or extracts to be assayed. Methods for preparing nucleic acid extracts of cells are well-known in the art and can be readily adapted in order to obtain a sample that is compatible with the method utilized.

### IX. Pharmaceutical Formulations and Routes of Administration

[0291] The compounds described herein can be administered to a human patient per se, or in pharmaceutical compositions where they are mixed with other active ingredients, as in combination therapy, or suitable carriers or excipient(s). Techniques for formulation and administration of the compounds of the instant application may be found in “Remington's Pharmaceutical Sciences, Mack Publishing Co., Easton, Pa., latest edition”. Exemplary routes include, but are not limited to, oral, transdermal, and parenteral delivery.

[0292] Suitable routes of administration may, for example, include depot, oral, rectal, transmucosal, or intestinal administration; parenteral delivery, including intramuscular, subcutaneous, intravenous, intramedullary injections, as well as intrathecal, direct intraventricular, intraperitoneal, intranasal, or intraocular injections.

[0293] Alternately, one may administer the compound in a local rather than systemic manner, for example, via injection of the compound directly into a solid tumor, often in a depot or sustained release formulation.

[0294] Furthermore, one may administer the drug in a targeted drug delivery system, for example, in a liposome coated with tumor-specific antibody. The liposomes will be targeted to and taken up selectively by the tumor.

[0295] Pharmaceutical compositions that include the compounds of the present invention may be manufactured in a manner that is itself known, e.g., by means of conventional mixing, dissolving, granulating, dragee-making, levigating, emulsifying, encapsulating, entrapping or lyophilizing processes.

[0296] Pharmaceutical compositions for use in accordance with the present invention thus may be formulated in conventional manner using one or more physiologically acceptable carriers including excipients and auxiliaries that facilitate processing of the active compounds into preparations that can be used pharmaceutically. Proper formulation is dependent upon the route of administration chosen.

[0297] For injection, the agents of the invention may be formulated in aqueous solutions, for instance in physiologically compatible buffers such as Hanks's solution, Ringer's solution, or physiological saline buffer. For transmucosal administration, penetrants appropriate to the barrier to be permeated are used in the formulation. Such penetrants are generally known in the art.

[0298] For oral administration, the compounds can be formulated readily by combining the active compounds with pharmaceutically acceptable carriers well known in the art. Such carriers enable the compounds of the invention to be formulated as tablets, pills, dragees, capsules, liquids, gels, syrups, slurries, suspensions and the like, for oral ingestion by a patient to be treated.

[0299] Pharmaceutical preparations for oral use can be obtained by adding a solid excipient, optionally grinding a resulting mixture, and processing the mixture of granules, after adding suitable auxiliaries, if desired, to obtain tablets or dragee cores. Suitable excipients are, in particular, fillers such as sugars, including lactose, sucrose, mannitol, or sorbitol; cellulose preparations such as, for example, maize starch, wheat starch, rice starch, potato starch, gelatin, gum tragacanth, methyl cellulose, hydroxypropylmethyl-cellulose, sodium carboxymethylcellulose, and/or polyvinylpyrrolidone (PVP).

[0300] If desired, disintegrating agents may be added, such as the cross-linked polyvinyl pyrrolidone, agar, or alginic acid or a salt thereof such as sodium alginate.

[0301] Dragee cores are provided with suitable coatings. For this purpose, concentrated sugar solutions may be used, which may optionally contain gum arabic, talc, polyvinyl pyrrolidone, carbopol gel, polyethylene glycol, and/or titanium dioxide, lacquer solutions, and suitable organic solvents or solvent mixtures. Dyestuffs or pigments may be added to the tablets or dragee coatings for identification or to characterize different combinations of active compound doses.

[0302] Pharmaceutical preparations that can be used orally include push-fit capsules made of gelatin, as well as soft, sealed capsules made of gelatin and a plasticizer, such as glycerol or sorbitol. The push-fit capsules can contain the active ingredients in admixture with filler such as lactose, binders such as starches, and/or lubricants such as talc or magnesium stearate and, optionally, stabilizers. In soft capsules, the active compounds may be dissolved or suspended in suitable liquids, such as fatty oils, liquid paraffin, or liquid polyethylene glycols. In addition, stabilizers may be added. All formulations for oral administration should be in dosages suitable for such administration. For buccal administration, the compositions may take the form of tablets or lozenges formulated in conventional manner.

[0303] For administration by inhalation, the compounds for use according to the present invention are conveniently delivered in the form of an aerosol spray presentation from pressurized packs or a nebuliser, with the use of a suitable propellant, e.g., dichlorodifluoromethane, trichlorofluoromethane, dichlorotetrafluoroethane, carbon dioxide or other suitable gas. In the case of a pressurized aerosol the dosage unit may be determined by providing a valve to deliver a metered amount. Capsules and cartridges of e.g. gelatin for use in an inhaler or insufflator may be formulated containing a powder mix of the compound and a suitable powder base such as lactose or starch.

[0304] The compounds may be formulated for parenteral administration by injection, e.g., by bolus injection or continuous infusion. Formulations for injection may be presented in unit dosage form, e.g., in ampules or in multi-dose containers, with an added preservative. The compositions may take such forms as suspensions, solutions or emulsions in oily or aqueous vehicles, and may contain formulatory agents such as suspending, stabilizing and/or dispersing agents.

[0305] Pharmaceutical formulations for parenteral administration include aqueous solutions of the active compounds in water-soluble form. Additionally, suspensions of the active compounds may be prepared as appropriate oily injection suspensions. Suitable lipophilic solvents or vehicles include fatty oils such as sesame oil, or synthetic fatty acid esters, such as ethyl oleate or triglycerides, or liposomes. Aqueous injection suspensions may contain substances that increase the viscosity of the suspension, such as sodium carboxymethyl cellulose, sorbitol, or dextran. Optionally, the suspension may also contain suitable stabilizers or agents that increase the solubility of the compounds to allow for the preparation of highly concentrated solutions.

[0306] Alternatively, the active ingredient may be in powder form for constitution with a suitable vehicle, e.g., sterile pyrogen-free water, before use. The compounds may also be formulated in rectal compositions such as suppositories or retention enemas, e.g., containing conventional suppository bases such as cocoa butter or other glycerides.

[0307] In addition to the formulations described previously, the compounds may also be formulated as a depot preparation. Such long acting formulations may be administered by implantation (for example subcutaneously or intramuscularly) or by intramuscular injection. Thus, for example, the compounds may be formulated with suitable polymeric or hydrophobic materials (for example as an emulsion in an acceptable oil) or ion exchange resins, or as sparingly soluble derivatives, for example, as a sparingly soluble salt.

[0308] A pharmaceutical carrier for the hydrophobic compounds of the invention is a co-solvent system including benzyl alcohol, a non-polar surfactant, a water-miscible organic polymer, and an aqueous phase. The co-solvent system may be the VPD co-solvent system. VPD is a solution of 3% w/v benzyl alcohol, 8% w/v of the non-polar surfactant polysorbate 80, and 65% w/v polyethylene glycol 300, made up to volume in absolute ethanol. The VPD co-solvent system (VPD: D5W) consists of VPD diluted 1:1 with a 5% dextrose in water solution.

[0309] This co-solvent system dissolves hydrophobic compounds well, and itself produces low toxicity upon systemic administration. Naturally, the proportions of a co-solvent system may be varied considerably without destroying its solubility and toxicity characteristics.

[0310] Furthermore, the identity of the co-solvent components may be varied: for example, other low-toxicity non-polar surfactants may be used instead of polysorbate 80; the fraction size of polyethylene glycol may be varied; other biocompatible polymers may replace polyethylene glycol, e.g. polyvinyl pyrrolidone; and other sugars or polysaccharides may substitute for dextrose.

[0311] Alternatively, other delivery systems for hydrophobic pharmaceutical compounds may be employed. Liposomes and emulsions are well known examples of delivery vehicles or carriers for hydrophobic drugs. Certain organic solvents such as dimethylsulfoxide also may be employed, although usually at the cost of greater toxicity. Additionally, the compounds may be delivered using a sustained-release system, such as semipermeable matrices of solid hydrophobic polymers containing the therapeutic agent. Various types of sustained-release materials have been established and are well known by those skilled in the art. Sustained-release capsules may, depending on their chemical nature, release the compounds for a few weeks up to over 100 days. Depending on the chemical nature and the biological stability of the therapeutic reagent, additional strategies for protein stabilization may be employed.

[0312] The pharmaceutical compositions also may include suitable solid or gel phase carriers or excipients.

[0313] Examples of such carriers or excipients include but are not limited to calcium carbonate, calcium phosphate, various sugars, starches, cellulose derivatives, gelatin, and polymers such as polyethylene glycols.

[0314] Many of the kinase modulating compounds of the invention may be provided as salts with pharmaceutically compatible counter-ions. Pharmaceutically compatible salts may be formed with many acids, including but not limited to hydrochloric, sulfuric, acetic, lactic, tartaric, malic, succinic, etc. Salts tend to be more soluble in aqueous or other protonic solvents that are the corresponding free base forms.

[0315] Pharmaceutical compositions suitable for use in the present invention include compositions where the active ingredients are contained in an amount effective to achieve its intended purpose. More specifically, a therapeutically effective amount means an amount of compound effective to prevent, alleviate or ameliorate symptoms of disease or prolong the survival of the subject being treated. Determination of a therapeutically effective amount is well within the capability of those skilled in the art, especially in light of the detailed disclosure provided herein.

[0316] For any compound used in the methods of the invention, the therapeutically effective dose can be estimated initially from cell culture assays. For example, a dose can be formulated in animal models to achieve a circulating concentration range that includes the IC₅₀ as determined in cell culture (i.e., the concentration of the test compound which achieves a half-maximal inhibition of the kinase activity). Such information can be used to more accurately determine useful doses in humans.

[0317] Toxicity and therapeutic efficacy of the compounds described herein can be determined by standard pharmaceutical procedures in cell cultures or experimental animals, e.g., for determining the LD₅₀ (the dose lethal to 50% of the population) and the ED₅₀ (the dose therapeutically effective in 50% of the population). The dose ratio between toxic and therapeutic effects is the therapeutic index and it can be expressed as the ratio between LD₅₀ and ED₅₀. It may be desired to use compounds that exhibit high therapeutic indices. The data obtained from these cell culture assays and animal studies can be used in formulating a range of dosage for use in humans. The dosage of such compounds lies preferably within a range of circulating concentrations that include the EDₛₒ with little or no toxicity. The dosage may vary within this range depending upon the dosage form employed and the route of administration utilized. The exact formulation, route of administration and dosage can be chosen by the individual physician in view of the patient's condition. (See e.g., Fingl, et al. (1975) The Pharmacological Basis of Therapeutics Chapter 1 page 1).

[0318] Dosage amount and interval may be adjusted individually to provide plasma levels of the active moiety which are sufficient to maintain the kinase modulating effects, or minimal effective concentration (MEC). The MEC will vary for each compound but can be estimated from in vitro data; e.g., the concentration necessary to achieve 50-90% inhibition of the kinase. Dosages necessary to achieve the MEC will depend on individual characteristics and route of administration. However, HPLC assays or bioassays can be used to determine plasma concentrations.

[0319] Dosage intervals can also be determined using MEC value. Compounds should be administered using a regimen that maintains plasma levels above the MEC for 10-90% of the time, for example from about 30 to about 90%, such as from about 50 to about 90%.

[0320] In cases of local administration or selective uptake, the effective local concentration of the drug may not be related to plasma concentration. The amount of composition administered will, of course, be dependent on the subject being treated, on the subject's weight, the severity of the affliction, the manner of administration and the judgment of the prescribing physician.

[0321] The compositions may, if desired, be presented in a pack or dispenser device which may contain one or more unit dosage forms containing the active ingredient. The pack may for instance include metal or plastic foil, such as a blister pack. The pack or dispenser device may be accompanied by instructions for administration. The pack or dispenser may also be accompanied with a notice associated with the container in a form prescribed by a governmental agency regulating the manufacture, use, or sale of pharmaceuticals, which notice is reflective of approval by the agency of the form of the compound for human or veterinary administration. Such notice, for example, may be the labeling approved by the U.S. Food and Drug Administration or other government agency for prescription drugs, or the approved product insert.

[0322] Compositions including a compound of the invention formulated in a compatible pharmaceutical carrier may also be prepared, placed in an appropriate container, and labeled for treatment of an indicated condition. Suitable conditions indicated on the label may include, for example, treatment of cancer.

[0323] In order that the invention may be readily understood and put into practical effect, particular embodiments will now be described by way of the following non-limiting examples.

### Exemplary Embodiments of the Invention

[0324] FIG. 1 depicts a characterization of tumor cell lines with regard to genetic alterations in the tyrosine kinase transcriptome (TKT). FIG. 1A: samples. The tissue origins and number of tumor cell lines derived thereof are summarized. FIG. 1B: patterns of genetic alterations. For each of the 254 tumor and 7 control cell lines, the specific pattern of non-synonymous genetic alterations within the tyrosine kinase transcriptome is provided (FIG. 30) and exemplarily shown for 5 skin-derived tumor cell lines. Germline polymorphisms and somatic mutations are highlighted in blue and yellow, respectively. FIG. 1C: genetic alterations per TKT. The number of tumor cell lines with the indicated number of somatic (light) or germline (dark) alterations detected therein is illustrated.

[0325] FIG. 2 depicts a characterization of protein tyrosine kinase genes with regard to genetic alterations detected in the transcripts of 276 tumor cell lines and control samples. As exemplified here for FGFR4, the spectrum of identified genetic alterations and the corresponding patterns of affected tumor cell lines or control samples was determined for each tyrosine kinase gene (FIG. 31). The total sample number carrying a given sequence variant is indicated, and affected cancer cell lines are subdivided according to their tissue origin. Somatic mutations are underlined, the remaining entries are germline polymorphisms. Heterozygocity is indicated by a hash, the other samples are homozygous carriers of the respective alteration.

[0326] FIG. 3 shows the distributions of non-synonymous polymorphisms identified in the TKT of 276 cancer cell lines and control samples. FIG. 3A: rates of germline alterations. The rates of missense (MS) or nonsense (NS) substitutions, deletions (DEL) and insertions (INS) subdivided into four frequency categories (1, 2-5, 6-10 or more than 10 affected samples) are summarized. FIG. 3B: domain localization of identified polymorphisms. The number of polymorphisms detected in distinct domains or other protein regions is indicated. FIG. 3C: tissue distribution of germline variations. The tissue distribution (BL: bladder; BS: bone and soft tissue; BA: brain; BE: breast; CV: cervix and vulva; CO: colon; EP: endometrium and placenta; HN: head and neck; HL: hematopoietic and lymphoid system; KI: kidney; LI: liver; LU: lung; OV: ovary; PA: pancreas; PR: prostate; SK: skin; ST: stomach; TE: testes; TY: thyroid, NO: normal control samples) was determined for all polymorphisms (FIG. 33) and presented here for those described in the text. Paired numerals indicate the number of carriers of the indicated variant as a subset of all cell lines with the same tissue origin that express the corresponding gene regardless of its genotype. Novel germline alterations are highlighted in bold type, parenthesized numbers refer to the following references that associate respective polymorphisms with cancer: 1.: Ullrich, A., et al., Nature, 313: 756-761, 1985; 2: Galland, F., et al., Oncogene, 8: 1233-1240, 1993; 3: Schmidt, L. S., et al. J Urol, 172: 1256-1261, 2004; 4: Gimm, O., et al., J Clin Endocrinol Metab, 84: 2784-2787, 1999; 5: Greco, A., et al. Am J Hum Genet, 64: 1207-1210, 1999; 6: Walter, J. W., et al. Genes Chromosomes Cancer, 33: 295-303, 2002; 7: Walters, D. K., et al., Cancer Cell, 10: 65-75, 2006; 8: Xie, D., et al. J Natl Cancer Inst., 92: 412-417, 2000; 9: Bange, J., et al., Cancer Res, 62: 840-847, 2002; 10: Tjin, E. P., et al., Blood, 107: 760-768, 2006; 11: Lee, J. H., et al., Oncogene, 19: 4947-4953, 2000; 12: Bounacer, A., et al. Br J Cancer, 86: 1929-1936, 2002; 13: Sturla, L. M., et al., Br J Cancer, 89: 1276-1284, 2003; 14: Ma, P. C., et al., Cancer Res, 65: 1479-1488, 2005; 15: Moriai, T., et al., Proc Natl Acad Sci USA, 91: 10217-10221, 1994; 16: Collesi, C., et al. Mol Cell Biol, 16: 5518-5526, 1996; 17: Lynch, T. J., Bell, et al., N Engl J Med, 350: 2129-2139, 2004; 18: Huusko, P., et al., Nat Genet, 36: 979-983, 2004; 19: Beghini, A., et al. Hematol J, 3: 157-163, 2002; 20: Kong-Beltran, M., et al. Cancer Res, 66: 283-289, 2006; 21: Reindl, C., et al. Blood, 107: 3700-3707, 2006.

[0327] FIG. 4 depicts the diverging occurrence rates of polymorphisms in different tumor types and/or control samples. The frequency of homozygous (HO; dark bar) and heterozygous (HE; light bar) carriers of EGFR R521K, TYK2 V362F and TNK1 M598delinsEVRSHX was determined. Only tissue origins (for abbreviations see legend to FIG. 1, supra) with an expression of the corresponding gene in at least 10 samples have been selected for this analysis.

[0328] FIG. 5 depicts the distributions of non-synonymous somatic mutations identified in all transcribed PTK genes from 254 tumor cell lines. A, rates of somatic mutations. The allocation to missense (MS) or nonsense (NS) substitutions, deletions (DEL) and insertions (INS) as well as frequency categories (1, 2-5, 6-10 or more than 10 affected samples) is shown. B, domain localization of identified mutations. The localization within defined domains or other protein regions is indicated. C, tissue distribution of sporadic alterations. For each somatic mutation, the tissue distribution (see legend to FIG. 3 for abbreviations) was determined (FIG. 37) and presented here for text-related examples. Paired numerals indicate the number of mutated and expression-positive cell lines within a given tumor type. Novel somatic mutations are highlighted in bold type, numbers in parenthesis refer to references given in the legend of FIG. 3 that associate respective mutations with cancer.

[0329] FIG. 6 is an illustration of known and novel genetic alterations in selected genes. A, SYK. The domain organization and location of genetic alterations is displayed. B, sequence comparison of FGFR1-4. For FGFR1-4, the general domain organization (middle) and sequence comparisons of the linker region connecting the IG-D2- and IG-D3-domain (top) as well as a part of the extracellular juxtamembrane region (bottom) are illustrated. Genetic alterations identified in our cell line screen are illustrated below, known sequence variants are depicted above the graphical representation of the domain structure. Polymorphisms are underlined, the remaining marked positions are somatic mutations. Numbers in parenthesis indicate the number of affected non-related cell lines. (SH2: Src Homolgy 2 Domain; TK: Tyrosine Kinase Domain; S: Signal Peptide; TM: Transmembrane Domain; IG: Immuno-globulin-Like Domain)

[0330] FGFR4 transcript is overexpressed (>2-fold) in ⅓ of hepatocellular carcinoma (HCC) patients (n=57) in the tumor vs. the adjacent normal tissue as determined by real-time PCR (FIG. 7, FIG. 8). The threshold cycle (Ct) value shown in FIG. 8 is scored as the cycle number where the fluorescence level crosses a predefined threshold value. The Cₜ value assigned to a particular sample thus reflects the point during the reaction at which a sufficient number of amplicons have accumulated, in that well, to be at a statistically significant point above the baseline. A lower Cₜ value accordingly reflects a higher relative gene expression.

[0331] A single nucleotide polymorphism, G388R is highly represented in Asian population (including HCC patients) and the homozygous 388Arg genotype correlates with an increased alpha-fetoprotein (a diagnostic marker for HCC) secretion in the respective patients at the point of tumor resection (FIG. 9, FIG. 10). Subsequent in vitro investigations revealed that stimulation of FGFR4 in HCC cell lines using a specific ligand, FGF19, elevated AFP production by the cells (FIG. 11, FIG. 12). Gene silencing as well the administration of a commercially available non-selective FGFR inhibitor (FIG. 13, FIG. 14), PD173074 blocks AFP production (FIG. 15). Furthermore, this inhibitor exhibited exquisite anti-proliferative effect on HCC cell lines vs. non-cancerous cell line, HEK293 (data not shown, LD50>50 micromolar, see also FIG. 16). Hence, it is postulated that FGFR4 activity contributes to normal-to-tumor progression of HCC and may be a viable target for pharmacological intervention.

[0332] TEC phosphorylation was shown after SCF, GM-CSF, IL-3, IL-6 stimulation. The TEC-kinase (66 kDa) is involved in cytoskeleton reorganization by increasing actin polymerization and formation of stress fibers (phalloidin). The TEC PH domain was found to bind Vav, a specific nucleotide exchange factor for Rho, Rac and Cdc42 (Machide, M., et al., Oncogene, August 17; 11(4):619-25 (1995)). Furthermore, TEC physically associates with c-kit through a region that contain a proline-rich motif, amino terminal of the SH3 domain. (Tang, B., et al., Mol Cell Biol. 1994 December; 14(12):8432-8437). TEC activates transcription factor such as NF-KappaB, c-Jun, c-Fos, Elk1 and SRF.

[0333] The genetic alterations identified in a cell line screen performed by the present inventors are illustrated in FIG. 18.

[0334] Mutations (all of Somatic Origin)
[0335] L89R AGS (heterozygous), mutation in pleckstrin homology domain
[0336] W531R Jurkat (homozygous), mutation in kinase domain

[0337] →P587L NCI-H661 (heterozygous), mutation in kinase domain R563K published somatic alteration

[0338] Subsequent in vitro investigation demonstrated that TEC L89R, W531R and P587L have decreased Tyrosine phosphorylation compared to TEC wt (FIG. 17). In addition, these somatic alterations are incapable of activating MAPK signaling (FIG. 19), c-fos (FIG. 20) and Stat3 activation (FIG. 21). Two publications support the finding that the W531R alteration abolishes kinase activity: It is shown that in Jak2 conversion of W1020 (corresponding W531 in TEC) abolished Jak2 kinase activity (Sandberg, E. M., et al., Mol. Cell. Biochem. October; 265(1-2):161-169 (2004)). Furthermore, disruption of W352 in CSK (corresponding W531 in TEC) leads to a 90% decrease in CSK activity (Lee, S., et al., Biochemistry October 8; 41(40):12107-12114 (2002).

[0339] A possible advantage of the T-cell lymphoma harboring the inactivating TEC W531R somatic mutation may be as follows: DNA damaging agents induce activation of AP-1 in T Lymphocytes and subsequent apoptosis (Kasibhatla, S., et al, Mol. Cell. 1998 March; 1(4): 543-51 (1988)). S. Kasibhatla et al. showed that treatment of Jurkat cells with Topoisomerase II inhibitors (etoposide, teniposide) or UV-B irradiation leads to activation c-fos mediated FasL expression followed by the induction of apoptosis. Etoposide (Etopophos, Eposin, Vepesid, VP-16) is used as a form of chemotherapy for various malignancies including lymphoma. Without being bound by theory it is postulated that TEC W531R may lead to resistance to etoposide treatment of T-cell Lymphoma (e.g. Jurkat cells) by decreasing Fas Ligand expression.

### Tyro3 and Mutants Expression Exhibit Enhanced Anti-Apoptotic Effects

[0340] Overexpression of Tyro3 in HEK293 confers resistance to the apoptosis upon treatment with TNFα/actinomycin-D. Furthermore, overexpression of mutants S531 L and P822L instead of wildtype Tyro3 enhanced anti-apoptotic effects. Preliminary data suggests that Tyro3 may perturb mitochondrial apoptotic signaling through the modulation of BCL2 family members. Hence, it is suggested that Tyro3 expression, and particularly the occurrence of mutants S531L and P822L may be a genetic marker for chemoresistance. Inhibitors of Tyro3 signaling may be a promising adjuvant with other chemotherapeutic agents.

### Somatic Mutation in Ack1

[0341] Ack1, also known as activated Cdc42-associated kinase 1, is a non receptor tyrosine kinase implicated in cancer progression. Sequencing effort initiated by Singapore OncoGenome programme has identified single base mutation that resulted in homozygous amino acid change from serine to Asparagine at amino acid 985 of kidney cancer line A498. In vitro ubiquitination assay in Hek 293 cells shows that mutation of 985 from serine to Asparagine resulted in a stable protein that is less sensitive to ubiquitination (FIG. 22).

### Alterations in TYK2 Lead to Decreased Kinase Activity.

[0342] A clearly differential occurrence of TYK2 F362 allele carriers was observed in brain—(75%) and hematopoietic/lymphoid system—(67%) derived tumor cell lines compared to control tissues (31%) or other tumor types (FIG. 4B). The under-representation of the TYK2 F362 allele in control samples indicates a tumor-promoting function with particular relevance for leukemia, melanoma, and glioma.

[0343] The skipping of entire exons in the cytoplasmic kinases TYK2 and TXK, TYK2 E971fsX67 and TXK Y414fsX15, for instance, results in frame shifts and premature translation termination in the tyrosine kinase domains, and thus most likely is associated with catalytic inactivation. The truncated TYK2 variant that lacks 206 aa of the kinase domain including the catalytic site and the activation loop may also impose a dominant negative effect on cell signals. Interestingly, Stoiber et al. reported that TYK2-deficient mice developed B and T lymphoid leukemia with higher incidence and shortened latency as a result of decreased cytotoxic capacity of TYK2−/− NK and NKT cells and thus impaired tumor surveillance (Stoiber, D., et al., J Clin Invest 114:1650-1658 (2004)). Since NK activity as part of the innate immune system mediates tumor rejection in general, the significance of TYK2 loss-of-function might not be restricted to hematopoietic malignancies, but may also be important for other cancer types. Consistent with this possibility, the inventors detected TYK2 E971fsX67 in cancer cells derived from various tissues including breast, cervix/vulva, colon, endometrium, lung, and pancreas (FIG. 3C) as well as 33 clinical breast, prostate, and kidney cancer specimens. Its occurrence in the control cell line BPH-1 suggests potential germline origin. Hence, the TYK2 E971fsX67 splice variant may also represent a prognostic marker for cancer patients and support therapeutic decision making.

### FGFR4 Y367C

[0344] The somatic mutation FGFR4 Y367C identified within the extracellular domain FGFR4 Y367C possibly augment receptor activation by receptor dimerization. The novel FGFR4 Y367C mutation was detected as a homozygous genotype in the breast cancer cell line MDA-MB-453, and the affected Y367 residue in the extracellular juxtamembrane domain is highly conserved throughout the FGFR family. Remarkably, homologous substitutions in FGFR1 (Y372C), FGFR2 (Y375C) and FGFR3 (Y373C) were shown to cause various osteogenic deficiency syndromes (Wilkie, A. O., Cytokine Growth Factor Rev 16:187-203 (2005)) through the formation of intermolecular disulfide bonds that force receptor dimerization and activation. Ligand-independent, constitutive receptor activation has been confirmed in vitro for FGFR1 Y372C (White, K. E., et al., Am J Hum Genet. 76:361-367 (2005)) and FGFR3 Y373C (d'Avis, P. Y., et al., Cell Growth Differ; 9:71-78 (1998)). Furthermore, the oncogenic potential of the FGFR3 Y373C variant has been demonstrated and was suggested to contribute to tumor progression of multiple myeloma (Chesi, M., Blood, 97:729-736 (2001)). Thus, it is most likely that Y367C as the homologous FGFR4 variant also results in basal receptor activation, which strongly indicates an important role of this mutant in cancer.

### FGFR1 P252S

[0345] FGFR1 P252S may lead to receptor activation by influencing ligand binding. The highly conserved FGFR1 P252 residue the inventors found to be heterozygously exchanged with hydrophilic serine in the melanoma cell line MeWo has previously been shown to be replaced by threonine in lung cancer (Davies, H., et al., Cancer Res; 65:7591-7595 (2005)) and arginine in patients with Pfeiffer syndrome (Muenke, M., et al., Nat Genet; 8:269-274 (1994)). The crystal structure of the homologous activating FGFR2 mutant, FGFR2P252R, revealed the formation of 3 additional hydrogen bonds with complexed fibroblast growth factor 2 (FGF2). They were predicted to increase the receptor's affinity for its specific ligand as well as to allow binding of a different set of ligands (Ibrahimi, O. A., et al., Proc Natl Acad Sci U S A; 98:7182-7187 (2001)). Since the hydroxy group of the P252-replacing serine residue in FGFR1 also has a high potential to form additional hydrogen bonds, the somatic FGFR1 P252S substitution may represent a gain-of-function mutation with analogous functional consequences as for FGFR2 P252R. This is particularly intriguing in the context of studies demonstrating that blockage of FGFR1 or bFGF function was associated with suppressed proliferation and survival of melanoma cells (Wang, Y, & Becker, D., Nat Med; 3:887-893 (1997)).

### CSK Q26X May Lead to Downregulation of Tumor Suppressor Activity

[0346] The heterozygous CSK Q26X nonsense substitution detected in the colon cancer cell lines DLD-1 and HCT-15 is consistent with reduced protein levels of this negative regulator of SRC-family kinases that were reported for ˜60% of human colon cancer cases with elevated SRC activity (Rengifo-Cam, W., et al., Oncogene; 23:289-297 (2004)). These data indicate a significant role of CSK nonsense mutations in the development and/or progression of colon carcinoma and therefore strongly suggest the inclusion of SRC kinase inhibitors in the therapeutic regimen of this prevalent malignancy.

### EXAMPLES

### Samples

[0347] Samples of primary invasive breast carcinomas were obtained from the archives of the Department of Pathology of the Technical University of Munich, Germany (Prof H. Hoefler) and the Department of Oncology of the University of Chieti, Italy (Dr. S. Iacobelli). Kidney tissue materials of tumors and healthy tissue as well as prostate cancer tissue were obtained from the Urology Department of the Klinikum Darmstadt, Germany (Prof. S. Peter). 14 cDNAs of normal tissue (spleen, testes, ovary, kidney, skeletal muscle, colon, prostate, bladder, cervix, pancreas, liver, brain, lung, gastric) derived from different individuals were purchased from Ambion.

[0348] Genomic DNA of 90 blood samples derived from non-cancer patients was purchased from Conch Institute for Medical Research (Camden, N.J., USA).

cDNA Synthesis

[0349] Total RNA was isolated according to the method described by Puissant and Houdebine.

[0350] Cancer cell lines were cultured according to conditions by the American Type Culture Collection (ATTC, http://www.atcc.org).

[0351] After homogenization of the cultured human cancer cells (80% confluency) or the primary tissue in a denaturing solution (4M guanidine thiocyanate, 25 mM sodium citrate, 0.5% Sarkosyl, 0.1M β-mercaptoethanol, 10 mM EDTA), the homogenate was sequentially mixed with 2M sodium acetate (pH 4.0), saturated phenol and finally with chloroform. The mixture was centrifuged and the upper phase was isopropanol precipitated, resuspended in denaturing solution and again reprecipitated with isopropanol. Following ethanol washing the pellet was resuspended in H₂O and incubated at 65° C. for 5 min. The quality of the total RNA was tested by gel electrophoresis.

[0352] For the extraction of poly(A)⁺RNA, total RNA was denatured at 70° C. (5 min) and applied to a oligo-dT-cellulose column along with a washing buffer (10 mM Tris/HCl pH7.4, 0.5M NaCl, 1 mM EDTA, 0.5% SDS). Following several washing steps the poly(A)⁺RNA was eluted (10 mM Tris/HCl pH7.4, 1 mM EDTA, 0.5% SDS) and precipitated with ethanol.

[0353] The conversion of the poly(A)⁺RNA into the complementary DNA (cDNA) was performed using the AMV reverse transcriptase (Promega AMV-RT) and oligo(dT) polymers and oligonucleotides (dNTP). After the synthesis the cDNA was purified using Qiagen PCR purification columns and eluted in 50 μl.

### PCR and Sequencing

[0354] For each cell line and control sample, whole cell cDNA was prepared and used for the amplification and direct sequencing of the complete PTK coding region. Primers for PCR amplification (and sequencing) were designed using Primer3 program (http://www-genome.wi.mit.edu/cgi-bin/primer/primer3_www.cgi), and were synthesized by Proligo (Singapore). PCR amplification was performed on cDNA from 265 early passage cell lines, placenta and 14 normal tissues (Ambion). PCR optimization was done in the first step with a cDNA pool of different cell lines, second step with 6/8 different individual cell lines, before being dispensed into a 96-well culture plate. Direct sequencing was done using a 96 capillary automated sequencing apparatus (ABI 3730XL).

### Analysis of Mutations

[0355] Sequence traces were assembled and analyzed to identify potential genomic alterations using the Mutation Surveyor software package (SoftGenetics, State College, Pa.). The tyrosine kinase gene sequences were aligned with the NCBI reference sequence (FIG. 24) and identified alterations were compared with the literature or public databases such as the NCBI SNP database (http://www.ncbi.nlm.nih.gov), the Ensemble Genome Browser (http://www.ensembl.org), the UniProtKB/Swiss-Prot database (http://ca.expasy.org) the SNP500Cancer database, and KinMutBase (http://bioinf.uta.fi/KinMutBase/main_frame.html).

[0356] Despite the lack of normal tissue counterparts for the established tumor cell lines, it was attempted to define the identified PTK transcript variations as somatic or germline sequence differences. Those sequence differences ere defined as germline polymorphisms that were either detected in our 22 controls or were previously reported as hereditary variants in the databases named above or the literature. If genetic alterations occurred neither in the 16 normal tissues nor in one of the cited databases, it was defined as a somatic mutation. Besides zygosity, cell line-specific variant profiles thus indicate germline or somatic origin of the individual TKT sequence variations. Representative examples are displayed for the skin-derived tumor cell lines A-375, BOW-G, C-32, C8161, and Colo-16 (FIG. 1B). The characterization of all cell lines can be found in FIG. 30.

### Gene Identification

[0357] The coding sequences of the analyzed RTK and TK genes were retrieved from NCBI (www.ncbi.gov). NCBI accession numbers are provided in FIG. 28.

### Results

[0358] In order to comprehensively characterize widely-used tumor cell lines with regard to non-silent alterations in all expressed tyrosine kinase genes, the inventors evaluated the sequence of the entire tyrosine kinase transcriptome of 254 established cancer cell lines (FIG. 28). These cell lines were derived from 19 different tissue origins (FIG. 1A), controls included 7 non-tumorigenic cell lines and 15 tissues from different organs of healthy individuals.

### Identification of 422 Non Synonymous Genetic Alterations in the TKT of 258 Cancer Cell Lines

[0359] Based on the abovee data, the absolute number and distribution of TKT-linked somatic mutations and germline polymorphisms was determined within the entire tumor cell line panel. In total, 72.08 Mb of cDNA sequence encoding the entire protein tyrosine kinase gene family of 59 receptor tyrosine kinases and 32 cytoplasmic protein tyrosine kinases were analyzed. 39.85 Mb of reverse transcribed mRNA were amplified that, apart from IRR, MUSK, FGR and SRMS for which no PCR product from any of the cDNA samples was obtained, represent the entire protein tyrosine kinome expressed within the 280 samples examined. With this analysis numerous silent DNA sequence differences (not presented and further analyzed) and 389 non-synonymous genetic alterations were identified that were amplifiable and represent the detectable TKT of all samples. The majority of these—namely 359 sequence differences—were missense single base substitutions that caused amino acid changes, whereas only two somatic base replacements resulted in the generation of translational termination codons. Furthermore, 43 deletions and 18 insertions were detected. Remarkably, 65 sequence differences to the NCBI database occurred in all cDNA samples analyzed, strongly indicating that these variants actually represent the wild-type rather than genetic alterations (not shown) and were possibly caused by sequencing errors in the human genome database or the fact that the database entries represent individual sequence variants.

[0360] The basis for the discrimination between sporadically occurring somatic mutations and hereditary germline alterations or polymorphisms was formed by the 22 control samples of tissues from healthy individuals and non-tumorigenic cell lines, and by the extensive variant information obtained from public databases such as the NCBI SNP database (http://www.ncbi.nlm.nih.gov), Ensemble Genome Browser (http://www.ensembl.org), the UniProtKB/Swiss-Prot database (http://ca.expasy.org), or the SNP500Cancer database (http://snp500gov.nci.nih.gov). Those genetic alterations that were either identified in the control samples or have been reported as polymorphisms in one of the databases or the literature were considered as germline alterations.

[0361] For polymorphisms, a Gaussian-like distribution was observed, with an average of 12.3 sequence variations per cancer cell line. In contrast, somatic mutations were unevenly distributed (FIG. 1C). No somatic alterations were detected in the TKT of 119 cancer cell lines, consistent with kinome mutations entirely absent in subsets of recently screened breast cancer, lung carcinoid, and testicular germ-cell tumor samples (Stephens et al., Nat Genet. 37:590-592 (2005); Davies et al., Cancer Res 65:7591-7595 (2005); Bignell et al., Genes Chromosomes Cancer 2006; 45:42-6). In contrast, high frequencies of 9 to 14 somatic mutations in the transcribed tyrosine kinomes of LNCaP, Jurkat, MeWo, MKN1, HCT-15 and DLD-1 might reflect a mutator phenotype (Stephens et al., 2005, supra). They are in agreement with sequence data of 24 cancer genes in the NCI-60 cell line panel that also showed HCT-15 to be one of the most frequently mutated tumor cell lines (Ikediobi et al., Mol Cancer Ther 5:2606-12 (2006)). With intermediate mutation rates for the other tumor cell lines, our data indicate an accumulation of somatic mutations in PTK transcripts of various cancer cell lines which may contribute to the progression characteristics of certain cancers.

[0362] As alternative to the allocation to cell line-specific variant profiles, these sequence differences were grouped by genes and PTK subfamilies. Each variation was thereby specified regarding the spectrum of affected cell lines as well as the zygosity status and the presumable somatic versus germline origin. These data are shown for FGFR4 (FIG. 2) that will be discussed below. The full information for all transcript variants and PTK genes can be obtained from FIG. 31-FIG. 33.

### Tykiva Database for Cancer Cell Line TKT Analysis

[0363] Additionally, all data on the identified PTK transcript variants are compiled in the database designated “Tykiva” (tyrosine kinome variant; http://tykiva.bii.a-star.edu.sg). Transcript variants can be specifically retrieved for each of the 254 tumor cell lines, 19 tissue origins/tumor types, or any of the 90 PTK genes. Somatic or germline origin is indicated, and other cell lines carrying the same variant are referred to. In graphical gene representations, the localization of all detected variants is displayed in the context of the reference amino acid sequence as well as predicted protein domain structures according to Swiss-Prot data. Optionally projectable to the major known isoforms, these illustrations cross-reference our data to variant information from the NCBI SNP database10, the Ensemble Genome Browser, the Swiss-Prot and the GenBank databases, the KinMutBase, the IDbases, and the literature. By that, they include the current knowledge of non-silent genetic variations in PTK genes.

[0364] The expressed PTK variants may define cell line-specific signaling characteristics and cancer-related cell properties. In the following sections, tissue distribution and localization of each polymorphism and somatic mutation within the respective protein sequence are therefore addressed. Based on these data and the current literature, potential functional and/or clinical relevance for some of the identified genetic variants are discussed.

[0365] The genetic alterations analyzed in primary tumor samples are shown in FIG. 36. All non-conservative genetic alteration that were found at least twice in the panel of 276 cell lines and control samples with at least one cell line being derived from breast-, kidney- or prostate cancer were analyzed for occurrence in cDNA obtained from 55 primary breast carcinomas, 55 prostate cancer specimens, 55 kidney cancer specimens, 50 healthy kidney tissues and in genomic DNA derived from blood of 90 non-cancer donors. The number of carriers per sample group is provided for each alteration. Genetic alterations considered somatic as a result of the cell line screen are indicated with asterisks.

### Characterization of 155 PTK Gene Sequence Polymorphisms

[0366] According to the above definition of somatic and germline sequence variants, 155 of the 389 identified alterations were classified as sequence polymorphisms. They include 131 SNPs, 16 germline deletions, and 8 insertions. Their overall frequencies and localization in distinct protein domains are summarized in FIGS. 3A and 3B. Moreover, the occurrence frequency of each polymorphism in individual tumor types or control samples was determined. Occurrence frequency was thereby defined as the fraction of carriers of a given sequence variant and the number of cell lines with the same tissue origin that express the corresponding gene regardless of its genotype (paired numbers in FIG. 3C and FIG. 35). It therefore reflects the expression aspect of respective genes and alterations, as addressed by our cDNA analysis.

[0367] Of the 131 missense substitutions, 100 had been reported previously. However, only 12 of them, as well as 2 deletions, have been connected with cancer so far (FIG. 35). Noteworthy, 5 of 8 novel deletions involve entire exons (FIG. 35) and most likely represent splice variants. Such variants could preferentially be detected because of the use of cDNA as sequencing target. Moreover, other transcription-related mechanisms such as epigenetic gene silencing or mRNA stability are also reflected by cDNA, and genetic alterations identified therein are thus likely to be expressed within the cell. However, a disadvantage of our approach is that it does not detect fusion kinase gene- or amplified kinase transcripts.

[0368] In order to verify the in vivo-relevance of the sequence variations detected in tumor cell lines, cDNA from 165 primary breast, kidney and prostate cancer specimens was analyzed as well as blood DNA from 90 healthy individuals for the occurrence of a representative subset of our identified genetic alterations. This subset was defined as all non-conservative sequence changes that were found at least twice in our panel of cell lines and control samples with at least one cell line originating from breast, kidney, or prostate cancer. All but 2 of the 46 polymorphisms that fulfilled these criteria could be verified in patient sample cDNAs or blood DNA (FIG. 36), hence confirming the in vivo-relevance of sequence variations in tumor cell lines.

[0369] Noteworthy, some novel polymorphisms have been reported as somatic mutations in the literature before. VEGFR2 P1147S, a non-conservative substitution within the catalytic domain of VEGFR2/KDR, for example, has been described as somatic mutation in hemangioma specimens (Walter et al. (2002) Genes Chromosomes Cancer 33: 295-303). This variant was identified in skeletal muscle tissue from a healthy control individual, clearly demonstrating its germline origin and supporting the assumption that various alterations reported earlier as somatic mutations might actually represent germline polymorphisms.

### Cancer Relevance of Identified Polymorphisms

[0370] More and more evidence has accumulated over the past years that indicates that genetic polymorphisms can significantly influence clinical parameters of human cancers. In order to provide first information on possible structural or functional consequences of individual polymorphisms the location of all identified polymorphisms within the respective protein sequence is presented herein. In FIG. 37, germline alterations in regions coding for the different domains, including kinase-, the transmembrane- and the juxtamembrane domains, are displayed. Furthermore, the tissue origins a given polymorphism has been found in are indicated (BL: bladder; BS: bone and soft tissue; BA: brain; BE: breast; CV: cervix and vulva; CO: colon; EP: endometrium and placenta; HN: head and neck; HL: hematopoietic and lymphoid system; KI: kidney; LI: liver; LU: lung; OV: ovary; PA: pancreas; PR: prostate; SK: skin; ST: stomach; TE: testes; TY: thyroid, NO: normal control samples).

[0371] Two polymorphisms in the cytoplasmic tyrosine kinase TYK2 and TXK transcripts, TYK2 E971fsX67 and TXK Y414fsX15, are remarkable because of their frequency and localization. TYK2 E971fsX67 and TXK Y414fsX15 were found in different cDNAs, and thus represent relatively frequent germline alterations. Both variations affect the tyrosine kinase domain, and in both cases, the deletion represents the loss of an entire exon associated with a frame shift and the generation of a premature translation termination site. For TYK2 E971FsX67, exon 19 beginning with the N-terminal Glu⁹⁷¹ was deleted, and in conjunction with the frame shift (fs) leading to a STOP-codon after another 67 amino acid residues, this resulted in the loss of the major part of the catalytic domain including the catalytic and the activation loop. The deletion of exon 13 in TXK (TXK Y414fsX15) also results in a truncated variant lacking the functional kinase activation loop and the subsequent C-terminal region, and thus is also very likely to be associated with disruption of catalytic activity.

[0372] The polymorphic in-frame deletion NTRK3 G466_Y529delinsD was found to affect the juxtamembrane membrane of this RTK in two brain, breast and skin tumor cell lines each as well as in three lung cancer and one control cell line. With exception of 12 amino acid residues that are most proximal to the transmembrane domain and 8 residues preceding the kinase domain, this deletion of exon 13 results in the loss of the entire juxtamembrane region. All deletions were detected in one allele only.

[0373] The single nucleotide polymorphism ACK1 P725L is among the novel germline variants the one with the highest frequency. It was detected in 80 different cancer cell line cDNA samples. Interestingly, Pro⁷²⁵ is one of the proline residues that define the affected region of ACK1 as a proline-rich domain. Similarly, in the cytoplasmic tyrosine kinase FAK the proline-rich domain was found to be affected by L926delinsPWRL. In contrast to ACK1 where Pro⁷²⁵ was replaced by an isoleucine, the substitution of FAK Lys⁹²⁶ by the polypeptide PWRL led to the insertion of an additional proline. In both cases the affinity and/or specificity for interacting binding proteins might be modulated.

[0374] In addition to the localization within the protein, strikingly different frequencies in particular tumor types might provide another hint for the potential cancer relevance of a given sequence alteration. The present inventors therefore determined the number of cDNA samples carrying a given germline variation of the reference sequence and the fraction of cell lines that express the corresponding gene (indicated by paired numbers in FIG. 37). As can be seen from FIG. 37 the representation frequency of several polymorphisms varies significantly in tumor cell lines of different tissue origins indicating the possibility of respective differential functional relevance.

[0375] Some of the identified polymorphisms have previously been associated with non-proliferative diseases. Respective functional modulations may, because of the pleitropic effects of many PTKs, also be relevant for cancer. This is exemplified by the V722I transversion in the pseudokinase domain of JAK3 that the inventors identified as a rare heterozygous polymorphism in the head and neck cancer cell lines SCC-10A and SCC-10B (FIG. 3C). First reported in patients with autosomal recessive T-B+ SCID syndrome (Schumacher, R. F., et al., Hum Genet. 106:73-79 (2000)), its recent detection in an acute megakaryoblastic leukemia (AMKL) patient and the capacity to transform Ba/F3 cells (Walters et al., Cancer Cell 10:65-75 (2006)) support a potential role in cancer. Another example is NTRK1 R780Q which the inventors found in the colon-, ovarian-, and head and neck cancer cell lines Caco2, SK-OV-8 and SCC-9 (FIG. 3C), respectively. This SNP affects the same arginine residue whose replacement with proline was shown to be associated with “congenital insensitivity to pain with Anhidrosis (CIPA)” and abrogation of catalytic tyrosine kinase activity in vitro (Greco e al., Am J Hum Genet. 64:1207-10 (1999)). Assuming a similar loss-of-function for the NTRK1 Q780 isotype, this variant may exert anti-apoptotic and hence pro-oncogenic effects, as expression of NTRK1 wild type was associated with induction of apoptosis and a favorable prognosis of neuroblastoma patients (Lavoie et al., J Biol Chem 280:29199-207 (2005)).

[0376] Cancer relevance was also established for MET T1010I which represents a biomarker for MET inhibitor efficacy (Jagadeeswaran et al. Cancer Res 66:352-61 (2006)) and was originally reported as a somatic gain-of-function mutation in small- and non-small cell lung cancers (SCLC, NSCLC; Ma et al., Cancer Res 63:6272-6281 (2003)) and malignant pleural mesotheliomas (MPM; Jagadeeswaran et al., 2006, supra). Its detection in 4 of our 90 blood control DNAs (FIG. 36), however, confirmed previous hints for potential germline occurrence (Tengs et al., Cancer Lett 239:227-233 (2006)). Moreover, the identification of MET T1010I in the prostate carcinoma cell line TSU-PR1 and a primary prostate tumor as well as in the brain-, breast-, colon-, hematopoietic- and skin cancer cell lines IHR-32, DAL, LS-123, U-266, and Colo-829, respectively (FIG. 3C and FIG. 36), suggests enhanced MET signaling in these tumor cell lines and expands the currently reported spectrum of affected tumor types.

### Polymorphism Frequencies in Cancer Cells Versus Normal Tissues

[0377] Differential occurrence rates of sequence polymorphisms in particular cancer types and/or normal tissues may indicate tumor suppressive or promoting effects. In order to address the potential relevance of all polymorphism for certain tumor types, their occurrence frequencies in tissue types and control samples was compared (FIG. 3C and FIG. 35). Only some examples are displayed in FIG. 4. For EGFR R521K, a relative over-representation of the EGFR K521 allele in cDNAs of normal control samples (55%), colon (52%), and head and neck (69%) tumor cell lines was detected (FIG. 4A) This indicates a possible tumor suppressive activity of the EGFR K521 isotype which apparently is not relevant to colon cancer and head and neck cancer. An attenuated growth response to EGFR ligands and reduced induction of the proto-oncogenes FOS, JUN, and MYC in EGFR K521, but not EGFR R521 expressing cells (Moriai et al., Proc Natl Acad Sci USA 91:10217-10221 (1994)), and an increased risk of local recurrence after chemoradiation treatment for rectal cancer patients with at least one EGFR R521 allele (Zhang et al., Clin Cancer Res 11:600-5 (2005)) support these conclusions. Similarly, a clearly differential occurrence of TYK2 F362 allele carriers was observed in brain—(75%) and hematopoietic/lymphoid system—(67%) derived tumor cell lines compared to control tissues (31%) or other tumor types (FIG. 4B. The novel polymorphism TNK M598delinsEVRSHX was found at low frequencies in control samples (5%) and cancer cells of several tissue origins, but occurred in 62% of blood-, 55% of skin- and, even more prominent, 80% of brain-derived tumor cell lines (FIG. 4C) In contrast to EGFR R521K, the under-representation of the TYK2 F362 allele and the TNK insertion in control samples indicates a tumor-promoting function with particular relevance for leukemia, melanoma, and glioma. It can be expected that, as for EGFR R521K (Zhang et al., 2005, supra) or FGFR4 G388R (Bange et al., Cancer Res 62:840-847 (2002)), the correlation with clinical parameters will assign therapeutic and/or predictive value to many of such unequally distributed alleles.

[0378] The domain localization and tissue distribution of identified polymorphisms is depicted in FIG. 35. The localization in distinct protein domains and the tissue distribution (BL: bladder; BS: bone and soft tissue; BA: brain; BE: breast; CV: cervix and vulva; CO: colon; EP: endometrium and placenta; FIN: head and neck; HL: hematopoietic and lymphoid system; KI: kidney; LI: liver; LU: lung; OV: ovary; PA: pancreas; PR: prostate; SK: skin; ST: stomach; TE: testes; TY: thyroid, NO: normal control samples) was determined for all polymorphisms. Paired numerals reflect the number of carriers of the indicated isotype as a subset of all cell lines within the given tissue origin that express the corresponding gene regardless of its genotype. Novel germline alterations are highlighted in bold type, polymorphisms located in the pseudokinase domain of JAK-family members are indicated as (ps), and skipping of entire exons is marked by asterisks. Parenthesized numbers refer to references given in the legend of FIG. 3 that associate indicated polymorphisms with cancer.

### Polymorphisms Affecting the Kinase Domain

[0379] The localization of genetic alterations within the respective protein sequence may be indicative of structural and/or functional consequences. The skipping of entire exons in the cytoplasmic kinases TYK2 and TXK, TYK2 E971fsX67 and TXK Y414fsX15, for instance, results in frame shifts and premature translation termination in the tyrosine kinase domains, and thus most likely is associated with catalytic inactivation. The truncated TYK2 variant that lacks 206 aa of the kinase domain including the catalytic site and the activation loop may also impose a dominant negative effect on cell signals. Interestingly, Stoiber et al. reported that TYK2-deficient mice developed B and T lymphoid leukemia with higher incidence and shortened latency as a result of decreased cytotoxic capacity of TYK2−/− NK and NKT cells and thus impaired tumor surveillance (Stoiber et al., J Clin Invest 114:1650-1658 (2004)). Since NK activity as part of the innate immune system mediates tumor rejection in general, the significance of TYK2 loss-of-function might not be restricted to hematopoietic malignancies, but may also be important for other cancer types. Consistent with this possibility, TYK2 E971fsX67 was detected in cancer cells derived from various tissues including breast, cervix/vulva, colon, endometrium, lung, and pancreas (FIG. 3C) as well as 33 clinical breast, prostate, and kidney cancer specimens. Its occurrence in the control cell line BPH-1 suggests potential germline origin. Hence, the TYK2 E971fsX67 splice variant may also represent a prognostic marker for cancer patients and support therapeutic decision making.

[0380] Overall, these examples point at the potential role of sequence polymorphisms as genetic parameters that may contribute to a patient-specific definition of disease predisposition, rate of progression, or responsiveness to therapeutic agents. In conjunction with simple detectability in blood samples, this renders polymorphisms to be highly valuable biomarkers for diagnostic patient characterization.

### Identification of 256 Somatic Mutations in Cancer Cell Lines

[0381] Of all sequence differences, 234 were undetectable in any of the control samples or public databases and were thus defined as somatic mutations. However, because of the lack of cell line-specific normal tissue controls, the possibility cannot be excluded that some actually represent rare germline polymorphisms. The somatic mutations are composed of 210 missense and 2 nonsense single nucleotide substitutions as well as 19 deletions and 3 insertions. While the majority (186) occurred once, 53 were found 2 to 5 times, and 3 in 6 to 10 tumor cell lines (FIG. 5A). Among the twice occurring somatic mutations, 20 were detected in cell lines originating from the same tumor donor (FIG. 24). They may be considered single mutations, thus adding up to a total of 206 non-recurring mutational events. As for the polymorphisms, all somatic TKT alterations are presented in the context of the respective protein domains and tumor types. Further, the ratio of affected and expression-positive cell lines are presented for each tissue origin (FIGS. 5B and 5C and FIG. 37).

[0382] The domain localization and tissue distribution of identified somatic mutations are summarized in FIG. 37. Somatic mutations are characterized with regard to their localization within the protein and the tissue origin (BL: bladder; BS: bone and soft tissue; BA: brain; BE: breast; CV: cervix and vulva; CO: colon; EP: endometrium and placenta; HN: head and neck; HL: hematopoietic and lymphoid system; KI: kidney; LI: liver; LU: lung; OV: ovary; PA: pancreas; PR: prostate; SK: skin; ST: stomach; TE: testes; TY: thyroid, NO: normal control samples) of affected cell lines. The first of the paired numerals provided for a given somatic mutation and particular tumor type indicates the number of mutated cell lines, the second numeral refers to the number of expression-positive cell lines. Somatic mutations affecting the activation loop (a), the catalytic loop (c), the P-loop (p) or the pseudokinase (ps) domain are indicated. Novel somatic mutations are highlighted in bold type, skipping of entire exons is indicated by asterisks. Numbers in parenthesis refer to references given in the legend of FIG. 3 (supra) that associate indicated mutations with cancer.

[0383] Consistent with SYK A353T to represent one of the 2 most prevalent mutations, the tumor suppressive tyrosine kinase SYK turned out to be the most frequently mutated kinase within our panel of 254 tumor cell lines. When absolute numbers of somatic mutations were compared, SYK scored highest with mutations detected in 11 non-related tumor cell lines (FIG. 38). After normalization with respect to the PTK transcription status, SYK showed the highest mutation rate of 30.3 sporadic alterations per 1 MB expressed coding sequence, followed by NTRK1, EPHA2, and FLT3 (FIG. 39). The domain organization of SYK and the known and novel genetic alterations are illustrated in FIG. 6A.

Somatic Mutations with Possible Oncogenic Potential

[0384] Somatic mutations clustering in the EGFR kinase domain (EGFR G719S, L858R, L861Q and others) have recently been reported for patients with Gefitinib-responsive NSCLC and were shown to enhance tyrosine kinase activity and sensitivity to Gefitinib in vitro (Paez et al., Science 304:1497-1500 (2004); Lynch et al., N Engl J Med 350:2129-2139 (2004); Pao et al., Proc Natl Acad Sci USA 101:13306-13311 (2004)). The present inventors found the EGFR G719S mutation to be heterozygously expressed in the colon cancer cell line SW-48 (FIG. 5C, FIG. 24 and FIG. 25). This demonstrates the existence of Iressa sensitivity-mediating mutations in cancers other than NSCLC and, in particular, suggests colon cancer as another potential indication for Gefitinib therapy.

[0385] Similar to EGFR L858R and Gefitinib, the KIT N822K mutation which the inventors confirmed in the AML cell line KASUMI-1 (Beghini et al., Hematol J, 3:157-163 (2002)) was reported to mediate sensitivity to Gleevec (Heinrich et al., J Clin Oncol 21:4342-4349 (2003)). The enhanced in vitro receptor activation shown for these EGFR and KIT mutations (30, 34) might be related to their location within the regulatory activation loop. In this respect, the sporadic variations FLT3 R849H, TEK A1006T, ABL G417E, ARG K450R, and TEC W531R which the inventors detected homo- or heterozygously in BM-1604, SK− MEL-2, MM-Leh, Caki-2, and Jurkat (FIG. 5C) are particularly intriguing as they are located in the activation loop as well. By inference, these mutations may also have a higher probability to modulate the TK catalytic activity and/or related signaling pathways within the respective tumor cell lines.

[0386] The 18 somatic mutations that the present inventors identified in intracellular juxtamembrane domains (FIG. 36) might affect functionally important elements that mediate downregulation of RTK activity. The in-frame deletion MET D981_E1027del as a result of exon 14 skipping, for instance, leads to the loss of c-Cbl E3-ligase binding, decreased ubiquitination, and prolonged ligand-dependent cell signaling in vitro and in vivo (Kong-Beltran et al.; Cancer Res 66:283-289 (2006)). While MET D981_E1027del was confirmed in the NSCLC cell line NCI-H596, its homozygous detection in breast and stomach cancer cell lines MDA-MB-415 and Hs746, respectively (FIG. 5C), provides evidence for its occurrence in tumor types other than the reported NSCLC (ibid; Ma et al.; Cancer Res 65:1479-1488 (2005)). Presuming enhanced sensitivity to anti-MET therapeutics that MET D981_E1027de1 was suggested to mediate (Kong-Beltran et al., 2006, supra), the findings disclosed herein extend the potential clinical relevance for this deletion.

[0387] The somatic mutations that the present inventors identified within the extracellular domain of two FGFR family members, FGFR1 P252S and FGFR4 Y367C (FIGS. 5C and 6B), possibly augment receptor activation by influencing ligand binding and receptor dimerization, respectively. The highly conserved FGFR1 P252 residue that the present inventors found to be heterozygously exchanged with hydrophilic serine in the melanoma cell line MeWo has previously been shown to be replaced by threonine in lung cancer (Davies et al., Cancer Res 65:7591-7595 (2005)) and arginine in patients with Pfeiffer syndrome (Muenke et al., Nat Genet. 8:269-274 (1994)). The crystal structure of the homologous activating FGFR2 mutant, FGFR2P252R, revealed the formation of 3 additional hydrogen bonds with complexed fibroblast growth factor 2 (FGF2). They were predicted to increase the receptor's affinity for its specific ligand as well as to allow binding of a different set of ligands (Ibrahimi et al., Proc Natl Acad Sci USA 98:7182-7187 (2001)). Since the hydroxy group of the P252-replacing serine residue in FGFR1 also has a high potential to form additional hydrogen bonds, the somatic FGFR1 P252S substitution may represent a gain-of-function mutation with analogous functional consequences as for FGFR2P252R. This is particularly intriguing in the context of studies demonstrating that blockage of FGFR1 or bFGF function was associated with suppressed proliferation and survival of melanoma cells (Wang & Becker Nat Med 3:887-93 (1997)).

[0388] The novel FGFR4 Y367C mutation was detected as a homozygous genotype in the breast cancer cell line MDA-MB-453, and the affected Y367 residue in the extracellular juxtamembrane domain is highly conserved throughout the FGFR family. Remarkably, homologous substitutions in FGFR1 (Y372C), FGFR2 (Y375C) and FGFR3 (Y373C) were shown to cause various osteogenic deficiency syndromes (Wilkie, Cytokine Growth Factor Rev 16:187-203 (2005)) through the formation of intermolecular disulfide bonds that force receptor dimerization and activation. Ligand-independent, constitutive receptor activation has been confirmed in vitro for FGFR1 Y372C (White et al., Am J Hum Genet. 76:361-367 (2005)) and FGFR3 Y373C (d'Avis et al., Cell Growth Differ 9:71-78 (1998)). Furthermore, the oncogenic potential of the FGFR3Y373C variant has been demonstrated and was suggested to contribute to tumor progression of multiple myeloma (Chesi et al.; Blood 97:729-736 (2001)). Thus, it is most likely that Y367C as the homologous FGFR4 variant also results in basal receptor activation, which strongly indicates an important role of this mutant in cancer.

### Nonsense Substitutions Abrogate Tumor Suppressor Activity

[0389] Downregulation of tumor suppressive activity is expected for the 2 nonsense substitutions that the present inventors detected in EPHB2 and CSK (FIG. 5C). Q722X-mediated truncation and kinase inactivation of EPHB2 in the two prostate cancer cell lines BM-1604 and DU-145 supports mutational inactivation to be involved in progression of prostate cancer as proposed by Huusko et al. They showed suppressed growth and colony formation of DU-145 cells upon reconstitution with functional EPHB2 (Huusko et al., Nat Genet. 36:979-983 (2004)). The heterozygous CSK Q26X nonsense substitution detected in the colon cancer cell lines DLD-1 and HCT-15 is consistent with reduced protein levels of this negative regulator of SRC-family kinases that were reported for ˜60% of human colon cancer cases with elevated SRC activity (Rengifo-Cam et al., Oncogene 23:289-97 (2004)). These data indicate a significant role of CSK nonsense mutations in the development and/or progression of colon carcinoma and therefore strongly suggest the inclusion of SRC kinase inhibitors in the therapeutic regimen of this prevalent malignancy.

[0390] The examples discussed above represent only a partial extract of our overall data. Other genetic alterations affecting less investigated PTKs such as members of the AATYK-, DDR-, EPH-, ROR-, ROS- or FRK families, as well as tyrosine kinases that more recently captured scientific attention such as HER3 or ACK1, have been found (FIGS. 25-29). Their identification shall support novel functional investigations towards the understanding of the therapeutic value of these kinases.

### Low Redundancy of PTK Gene Mutations in Human Tumors

[0391] In agreement with results from previous studies (Stephens et al., 2005, supra; Davies et al., 2005, supra; Bignell et al., 2006, supra; Stephens et al., 2004, supra; Bardelli et al., 2003, supra; Thomas et al., 2007, supra; Greenman et al., 2007, supra; Sjoblom et al., Science 314:268-274 (2006)), the analysis of 254 cancer cell lines and additional primary tumors presented here indicates that mutational patterns might be quite unique for the majority of human tumors, and that the frequency of specific somatic mutations in PTKs is low. Data mining of public databases and the literature revealed that only 9 of all sporadic alterations identified in our study have been described before (FIG. 37). Among them are KIT N822K and VEGFR1 R781Q as the 2 only ones that were picked up in the currently most comprehensive mutational kinome analysis of human cancer samples (Greenman et al., 2007, supra). The low redundancy of somatic mutations is furthermore reflected by the non-recurrence that that the present inventors found for 206 of the 256 mutational events within our panel of tumor cell lines.

[0392] Consistent with this picture, none of the 7 somatic representatives of our exemplary subset of non-conservative and more frequent alterations found in at least one breast-, kidney-, or prostate cancer cell line could be detected in any of the 165 primary breast-, kidney- and prostate cancer specimens (FIG. 36). In fact, two genetic alterations, YES K113Q and TYRO3 E489K, were found in blood controls and therefore must be considered rare germline alterations.

[0393] Despite the low redundancy of individual mutations, 70 of the tyrosine kinase genes turned out to carry at least one somatic mutation. Although most of our mutations require further experimental evaluation to determine their cancer relevance and in some cases may turn out to represent “passenger” rather than “driver” mutations, this broad incidence of sporadic alterations underscores the central importance of the entire PTK family in oncogenesis. Moreover, it provides further compelling support for the development of multi-targeted kinase inhibitors or combination of complementary therapeutics as cancer treatments which may be adapted to the pathological and genetic parameters of an individual patient. The extensive characterization of established tumor cell lines with respect to transcriptional profiles of genetic variations in this currently most promising cancer target family will aid in the selection of suitable cell systems, data interpretation and target validation, and thereby support preclinical development of novel targeted cancer drugs.

### Cell Culture, Plasmids

[0394] HEK293, Jurkat E6.1, HuH7, HepG2, MCF-7 and MDA-MB-231 cells were purchased from ATCC (Manassas, Va.). HEK 293, HuH7 and MCF-7 were maintained in DMEM (high glucose) medium supplemented with sodium pyruvate and 10% FCS. Jurkat E61 and MDA-MB-231 were maintained in RPMI supplemented with L-glutamine, sodium pyruvate and 10% FCS. HepG2 was maintained in MEM supplemented with non-essential amino acids, L-glutamine, sodium pyruvate and 10% FCS. All cell culture reagents were from Invitrogen (Carlsbad, Calif.) unless otherwise stated.

[0395] Full-length cDNAs encoding TEC were amplified by PCR from a human placenta cDNA library and subcloned into pcDNA3 (Invitrogen, Carlsbad, Calif.). Generation of mutants was performed using QuikChange Site-Directed Mutagenesis Kit from Statagene (La Jolla, USA). The expression construct for human Ack1 (pXJ40-Ack1-Flag) was a gift from Edward Manser (IMCB, A*STAR, Singapore).

### Sample Preparation:

[0396] Fifty seven adjacent normal tissue were obtained from resected livers of patients from the National University Hospital (patient's consent for collection of tissue was obtained prior operation). The tumor and normal liver tissues were visually separated. Both tumor and normal tissue were cut into small pieces and flash frozen in liquid nitrogen immediately after being harvested from patients. The frozen tissues were later stored in −80° C. RNA extraction from frozen tissue was carried out by TriZol method as described previously (Chomczynski, P., & Sacchi, N., Nat Protoc 1:581-5 [2006]).

mRNA Purification

[0397] mRNA was purified from total RNA (50 μg per sample) using the Oligotex mRNA kit (Qiagen, Valencia, Calif.) performed according to manufacturer's protocol. The resulting mRNA from the Oligotex columns was eluted with two volumes of 50 μL of the elution buffer supplied in the kit. To purify and concentrate the eluant, 2 μL of pellet paint (Merck, Darmstadt, Germany) and 10 μL of 3M sodium acetate were first added to enhance visualization of the produce before precipitating overnight with 200 μL of absolute ethanol at −20° C. The resultant mRNA was pelleted by spinning at 13,000 rpm for 30 min and subsequently washed with another volume of 80% ethanol. The final precipitate was air-dried and re-dissolved in 10 μL of RNAse-free water.

First Strand cDNA Synthesis

[0398] The purified mRNA (4 μL) from above was mixed gently with 1 μL of OligoDT15 primer (100 μM, Roche, Basel, Switzerland) in a 1.5 mL microcentrifuge tube and incubated at 70° C. for 2 min. After cooling on ice, 15 μL of reverse transcription mix containing 4 μL of 5×RT buffer, 2.4 μL of MgCl₂, 1 μL dNTP (10 mM), 1 μL RNase inhibitor, 1 μL ImProm-II RT (Promega) and 5.6 μL of water was added. The reaction was maintained at 42° C. for 1 h and was quenched with 75 μL of TE buffer. The resultant cDNAs were purified with QiaQuick PCR purification kit (Qiagen).

### Sequencing and Mutational Analysis:

[0399] Primers for PCR amplification of cDNA samples (and sequencing) were designed using Primer3 program (http://www-genome.wi.mitedu/cgi-bin/primer/primer3_www.cgi), and were synthesized by Proligo (SigmaAldrich, Singapore). PCR reactions were optimized as previously described for FGFR4. Direct sequencing was done using a 96 capillary automated sequencing apparatus (ABI 3730XL). Sequence traces were assembled and analyzed to identify potential genomic alterations using the Mutation Surveyor software package (SoftGenetics, State College, Pa.). The entire coding sequence of FGFR4 was aligned to the NCBI reference sequence (NM_{—}002011.2) and identified alterations were compared to known mutations in the literature (in publications) or public databases such as NCBI SNP database (http://www.ncbi.nlm.nih.gov), the Ensemble Genome Browser (http://www.ensembl.org), the UniProtKB/Swiss-Prot database (http://ca.expasy.org) and KinMutBase (http://bioinf.uta.fi/KinMutBase/main_frame.html).

### Quantitative Real-Time PCR

[0400] Quantitative RT-PCR was carried out using an Applied Biosystems 7300 Real-time PCR system (ABI, Foster City, Calif.) with pre-optimized TaqMan Gene Expression Assay for human FGFR4 and human GAPDH as the housekeeping control. The thermal cycling condition included an initial denaturation step at 95° C. for 10 min, followed by 40 cycles at 95° C. for 15 s and 60° C. for 60 s. The samples were prepared in triplicate with 4 μL of prediluted cDNA (2-10 fold) samples each. Data were obtained as an average CT value, and subsequently normalized against GAPDH endogenous control as ΔC_{T}. Expression changes in FGFR4 transcripts between the normal and the corresponding tumor tissue were expressed as fold change using 2̂(difference in ΔC_{T} between pairs).

### Ligand Stimulation Assay

[0401] HepG2 or HuH7 cells were seeded into 96-well plates and allowed to attach overnight. They were serum-starved for 24 h before addition of heparin. Two hours later, FGF19 (R&D Systems, Minneapolis, Minn., 50-100 ng/mL final concentration) was administered. After 8 hours, aliquots of the supernatant were harvested for AFP ELISA assay as described below. Similar FGF19 stimulations were performed in 10 cm dishes for immunoblot detection of phospho-FRS2α.

### Immunoprecipitation, Immunoblot Assay

[0402] All fractions collected were assayed for protein concentration using a BCA protein assay kit (Pierce, Rockford, Ill.). Lysates were pre-cleared by centrifugation at 13 000 r.p.m. for 10 min at 4° C. For immunoprecipitation, supernatants were diluted with an equal volume of HNTG buffer (Seedorf, K., et al., J Biol. Chem. Jun. 10; 269(23):16009-16014 (1994)) and subsequently immunoprecipitated using the respective antibodies and 20 μl of protein A/G-Sepharose for 4 h at 4° C. Precipitates were washed three times with 0.5 ml of HNTG buffer, suspended in SDS sample buffer and boiled for 3 min.

[0403] For the immunoblot assay, sample proteins (30-50 μg) or the immunoprecipitated samples were resolved by denaturing electrophoresis using 7.5 SDS-PAGE and transferred to nitrocellulose membranes for 2 h at 5 V using Trans-Blot SD Semi-Dry Transfer Cell (Bio-Rad). Immunodetection was by chemiluminescence (SuperSignal West Dura Extended, Pierce) using specific antibodies diluted in PBS with 0.05% (v/v) Tween 20 and 5% (w/v) powdered milk. Anti-phospho-FRS2α anti-HA, anti-phospho-MAPK, anti-MAPK, anti-phospho-Stat3, anti-Stat3 were from Cell Signaling Technology (Beverly, Mass.); anti-Ack1, anti-myc and anti-FGFR4 were from Santa Cruz Biotechnology (Santa Cruz, Calif.); anti-β-actin controls and anti-TEC were from Abcam (Cambridge, UK); anti-4G10 and anti-TYK2 were from Upstate (Lake Placid, N.Y., USA); anti-Hsp60, anti-Flag were from Sigma (St Louis, USA). Secondary anti-mouse and anti-rabbit horseradish peroxidase conjugated secondary antibodies (Pierce) were used at 1:10000 dilution.

### AFP ELISA Assay

[0404] Supernatants from the respective FGF19 stimulation and siRNA experiments were subjected to AFP ELISA assay using the DELFIA hAFP kit (Perkin Elmer, Boston, Mass.), performed according to manufacturer's protocol. The readout was converted to concentration (ng/mL) using the standard curve derived from the solutions provided in the kit. AFP production by the cells was subsequently normalized to the number of cells in each well. The cell number was determined by ATP bioluminescence Cell-Titer Glo assay (Promega, Madison, Wis.) using protocol as described by the manufacturer.

Gene Silencing by siRNA

[0405] HuH7 cells were grown on 24-well plate to 50% confluence before transfection with siRNA (small interfering RNAs). Custom-made ON-TARGETplus siRNA designed for silencing FGFR4 (Accession number: NM_{—}002011) expression was purchased from Dharmacon. A microcentrifuge tube containing 1.3 μL of 20 μM siRNA and 40.2 μL complete growth medium was prepared (Tube A). Simultaneously, another tube containing 1 oligofectamine (Invitrogen) and 7.5 μL growth medium was also prepared (Tube B). Both tubes were incubated at room temperature for 5 min before combining the contents and left to stand for another 20 min. Next, each well of HuH7 cells was replaced with fresh serum-free medium (200 μL). The combined volume of the siRNA transfection mix (50 μL) was added to the well and incubated at 37° C. After 4 h, the samples were loaded with another 250 μL of growth medium containing 20% serum. Immunoblot and AFP ELISA assays were subsequently performed after 72 h incubation of the cells with the FGFR4 silencing complex.

c-fos Gene Reporter Assay

[0406] HEK-293 cells (2×10⁴/96-well) were transiently transfected with 0.2 μg of the pfos/luc reporter plasmid (Yamashita et al., Blood 91, 1496-1507 (1998)) and 0.1 μg of expression plasmids for TEC or its mutants. 24 hours after transfection luciferase activity was measured with the use of the dual luciferase assay system (Promega, Madison, Wis.).

### Ubiquitination Assay

[0407] 3.5×10⁶ Hek 293 cells were seeded on 10 cm dish. Cells were co-transfected with 7.5 μg Myc-tagged Ubiquitin and 10 μg Flag-tagged Ack1, Ack1 S985N, Mop1 and EphA5, using Lipofectamine™ 2000 (Invitrogen, San Diego, Calif.) according to the manufacturer's instructions.

[0408] 20 hours post transfection, cells are incubated with 10 μM MG132 (Sigma, St Louis, Mo.) for 8 hours and lysed by RIPA buffer. 500 μg of protein lysate were used for immunoprecipitation with 2 μg anti-myc antibody at 4 degrees Celsius overnight. IP samples were washed and denatured with SDS-lysis buffer (50 mM Tris-HCl pH 6.8, 100 mM DTT, 2% SDS) and separated on a 7.5% SDS-PAGE gel. Co-IP proteins were detected using anti-Flag antibodies.

### MG132 Treatment

[0409] 1×10⁶ HepG2 cells were seeded on 6 well plate the day before treatment. Cells were incubated with 10 μM MG132 (Sigma, St Louis, Mo.) and harvested according to time course. 30 μg cell lysate was separated with a 7.5% SDS-PAGE gel.

[0410] The listing or discussion of a previously published document in this specification should not necessarily be taken as an acknowledgement that the document is part of the state of the art or is common general knowledge.

[0411] The invention has been described broadly and generically herein. Each of the narrower species and subgeneric groupings falling within the generic disclosure also form part of the invention. This includes the generic description of the invention with a proviso or negative limitation removing any subject matter from the genus, regardless of whether or not the excised material is specifically recited herein.

[0412] One skilled in the art would readily appreciate that the present invention is well adapted to carry out the objects and obtain the ends and advantages mentioned, as well as those inherent therein. Further, it will be readily apparent to one skilled in the art that varying substitutions and modifications may be made to the invention disclosed herein without departing from the scope and spirit of the invention. The molecular complexes and the methods, procedures, treatments, molecules, specific compounds described herein are presently representative of preferred embodiments are exemplary and are not intended as limitations on the scope of the invention. Changes therein and other uses will occur to those skilled in the art which are encompassed within the spirit of the invention are defined by the scope of the claims.

[0413] The invention illustratively described herein suitably may be practiced in the absence of any element or elements, limitation or limitations which is not specifically disclosed herein. Thus, for example, in each instance herein any of the terms “comprising”, “consisting essentially of” and “consisting of” etc. shall be read expansively and without limitation, and are not limited to only the listed components they directly reference, but include also other non-specified components or elements. As such they may be exchanged with each other. Additionally, the terms and expressions which have been employed are used as terms of description and not of limitation, and there is no intention that in the use of such terms and expressions of excluding any equivalents of the features shown and described or portions thereof, but it is recognized that various modifications are possible within the scope of the invention claimed.

[0414] Other embodiments are within the following claims. In addition, where features or aspects of the invention are described in terms of Markush groups, those skilled in the art will recognize that the invention is also thereby described in terms of any individual member or subgroup of members of the Markush group.

1. An isolated, enriched, or purified nucleic acid molecule encoding a mutant of a protein kinase polypeptide, wherein the protein kinase polypeptide is selected from the group consisting of FGFR4, FGFR1, Tyro3, TEC, CSK and Ack1, and
wherein the mutant of the protein kinase polypeptide encoded by the nucleic acid molecule comprises at least one mutation selected from the group consisting of FGFR4 Y367C (SEQ ID No: 133), FGFR1 P252S (SEQ ID No: 129), Tyro3 S531L (SEQ ID No: 257), Tyro3 P822L (SEQ ID No: 259), TEC L89R (SEQ ID No: 240), TEC W531R (SEQ ID No: 241), TEC P587L (SEQ ID No: 242), CSK Q26X (SEQ ID No: 52) and ACK1 S985N (SEQ ID No: 14).

2. A method of identifying a cell that is resistant to apoptosis inducing reagents (chemoresistant), the method comprising:
measuring in the cell the expression of the protein kinase Tyro3 and comparing the result of the measurement obtained with that of a control measurement, wherein an increased expression of protein kinase Tyro3 indicates resistance of the cell to apoptosis inducing reagents;
identifying the amino acid at position 531 or 822 of the expressed protein kinase Tyro3, wherein the presence of Leucine at position 531 instead of Serine or the presence of Leucine at position 822 instead of Proline indicates increased resistance of the cell to apoptosis inducing reagents; or
identifying the amino acid at position 89, 531 or 587 of the expressed protein kinase TEC, wherein the presence of Arginine at position 89 instead of Leucine, the presence of Arginine at position 531 instead of Tryptophan, or the presence of Leucine at position 587 instead of Proline indicates increased resistance of the cell to apoptosis inducing reagents.

3. The method of claim 2, wherein the amino acid at position 531 of the expressed protein kinase TEC is identified and wherein the cell is a T cell.

4. The method of claim 2, wherein the amino acid at position 89 of the expressed protein kinase TEC is identified and wherein the cell is a stomach cell.

5. The method of claim 2, wherein the amino acid at position 587 of the expressed protein kinase TEC is identified and wherein the cell is a lung cell.

6. (canceled)

7. A method of identifying a cell having a predisposition to transform into a cancer cell, the method comprising:
identifying the amino acid at position 367 of the expressed protein kinase FGFR4 or the amino acid at position 252 of the expressed protein kinase FGFR1, wherein the presence of Cysteine at position 367 of the expressed protein kinase FGFR4 instead of Tyrosine and/or the presence of Serine at position 252 of the expressed protein kinase FGFR1 instead of Proline indicates an increased predisposition to transform into a cancer cell;
identifying in the cell, the cell being a liver cell, the amino acid at position 388 of the expressed protein kinase FGFR4, wherein the presence of Arginine at position 388 instead of Glycine indicates an increased predisposition to transform into a hepatocellular carcinoma cell;
identifying the amino acid at position 26 of the expressed protein kinase C-terminal Src kinase (CSK), wherein the presence of an amino acid different from Glutamine at position 26 of the expressed protein kinase CSK indicates an increased predisposition to transform into a cancer cell; or
identifying the amino acid at position 985 of the expressed protein kinase Ack1, wherein the presence of Asparagine at position 985 of the expressed protein kinase Ack1 instead of Serine indicates an increased predisposition to transform into a cancer cell.

8. (canceled)

9. The method of claim 7, wherein the amino acid at position 26 of the expressed protein kinase CSK is identified and wherein the cell is a colon cell.

10. The method of claim 7, wherein the presence of Asparagine at position 985 of protein kinase Ack1 renders the protein kinase less susceptible to ubiquitination, thereby rendering the protein kinase more durable than protein kinase Ack1 comprising Serine at position 985, and wherein the cell is a kidney cell.

11. The method of claim 7, wherein the amino acid at position 388 of the expressed protein kinase FGFR4 is identified, and wherein further the genotype of the gene encoding the FGFR4 receptor in the liver cell is determined, wherein the homozygous genotype FGFR4 388Arg indicates an increased predisposition to transform into a hepatocellular carcinoma cell.

12-17. (canceled)

18. The nucleic acid molecule according to claim 1, wherein the nucleic acid molecule is isolated from a natural source, wherein the natural source is a mammal, and wherein the mammal is a human.

19-20. (canceled)

21. The nucleic acid molecule according to claim 1, wherein the nucleic acid molecule is of recombinant origin or wherein the nucleic acid molecule is RNA or DNA.

22-23. (canceled)

24. A nucleic acid probe for the detection of a nucleic acid molecule encoding a mutant kinase polypeptide in a sample, wherein the mutant kinase polypeptide is selected from the group consisting of ACK1, CSK, FGFR1, FGFR4, TEC, and TYRO3, and wherein said mutant kinase polypeptide encoded by said nucleic acid molecule comprises at least one of the mutations ACK1 H37Y (SEQ ID No: 274), ACK1 E111K (SEQ ID No: 275), ACK1 R127H (SEQ ID No: 276), ACK1 M393T (SEQ ID No: 277), ACK1 A634T (SEQ ID No: 278), ACK1 S699N (SEQ ID No: 279), ACK1 P731L (SEQ ID No: 280), ACK1 R748W (SEQ ID No: 281), ACK1 G947D (SEQ ID No: 282), ACK1 S985N (SEQ ID No: 283), CSK Q26X (SEQ ID No: 321), FGFR1 R78H (SEQ ID No: 397), FGFR1 P252S (SEQ ID No: 398), FGFR1 A268S (SEQ ID No: 399), FGFR1 G539_K540del (SEQ ID No: 400), FGFR4 Y367C (SEQ ID No: 402), TEC L89R (SEQ ID No: 509), TEC W531R (SEQ ID No: 510), TEC P587L (SEQ ID No: 511), TYRO3 S324C (SEQ ID No: 524), TYRO3 E489K (SEQ ID No: 525), TYRO3 S531L (SEQ ID No: 526), TYRO3 N788T (SEQ ID No: 527) and TYRO3 P822L (SEQ ID No: 528), wherein said nucleic acid probe contains a nucleotide base sequence that will hybridize to the mutated region of said nucleic acid sequence.

25-27. (canceled)

28. A method for detecting the presence or amount of nucleic acid molecule encoding a mutant kinase polypeptide or a kinase polypeptide variant in a sample comprising the steps of a) contacting the sample with a nucleic acid probe according to claim 24 under conditions such that hybridization occurs and b) detecting the presence or amount of the probe bound to the nucleic acid molecules encoding a mutant kinase polypeptide.

29-32. (canceled)

33. A kit for performing the method of claim 28, including a container means having disposed therein one or more nucleic acid probes according to claim 24.

34-35. (canceled)

36. A recombinant cell or tissue comprising a nucleic acid molecule according to claim 1.

37. (canceled)

38. An isolated, enriched, or purified mutant kinase polypeptide selected from the group consisting of ACK1, CSK, FGFR1, FGFR4, TEC, and TYRO3, wherein said mutant kinase polypeptide comprises at least one of the mutations ACK1 H37Y (SEQ ID No: 5), ACK1 E111K (SEQ ID No: 6), ACK1 R127H (SEQ ID No: 7), ACK1 M393T (SEQ ID No: 8), ACK1 A634T (SEQ ID No: 9), ACK1 S699N (SEQ ID No: 10), ACK1 P731L (SEQ ID No: 11), ACK1 R748W (SEQ ID No: 12), ACK1 G947D (SEQ ID No: 13), ACK1 S985N (SEQ ID No: 14), CSK Q26X (SEQ ID No: 52), FGFR1 R78H (SEQ ID No: 128), FGFR1 P252S (SEQ ID No: 129), FGFR1 A268S (SEQ ID No: 130), FGFR1 G539_K540del (SEQ ID No: 131), FGFR4 Y367C (SEQ ID No: 133), TEC L89R (SEQ ID No: 240), TEC W531R (SEQ ID No: 241), TEC P587L (SEQ ID No: 242), TYRO3 S324C (SEQ ID No: 255), TYRO3 E489K (SEQ ID No: 256), TYRO3 S531L (SEQ ID No: 257), TYRO3 N788T (SEQ ID No: 258) and TYRO3 P822L (SEQ ID No: 259), or a fragment thereof.

39-50. (canceled)

51. A method for detecting the presence or amount of at least one mutant kinase polypeptide or kinase polypeptide variant in a sample, comprising the steps of a) probing the sample with a monoclonal or polyclonal antibody or antibody fragment having specific binding affinity only for a mutant kinase polypeptide according to claim 38 or a mutant kinase polypeptide domain or fragment thereof, under conditions suitable for kinase-antibody immunocomplex formation and b) detecting the presence or amount of the antibody bound to the kinase polypeptide.

52. A kit for performing the method of claim 51, including the antibody or the antibody fragment.

53-54. (canceled)

55. A method for identifying a compound that modulates kinase activity in vitro comprising the steps of: (a) contacting a kinase polypeptide according to claim 38; or a kinase polypeptide selected from the group consisting of ACK1, FGFR4, and TYRO3, wherein said kinase polypeptide comprises at least one of the germline alterations ACK1 R1038H (SEQ ID No. 546), FGFR4 V10I (SEQ ID No. 580), and TYRO3 I346N (SEQ ID No. 655), or any functional fragment thereof, with the proviso that said fragment includes the altered region, or the mutant kinase polypeptide FGFR1 V427_T428del consisting of the amino acid sequence set forth in SEQ ID NO: 577 or the mutant kinase polypeptide FGFR4 G388R consisting of the amino acid sequence set forth in SEQ ID NO: 582 with a test substance; (b) measuring the activity of said polypeptide; and (c) determining whether said substance modulates the activity of said polypeptide.

56-58. (canceled)

59. A method for identifying a compound that modulates kinase activity in vivo comprising the steps of: (a) expressing a kinase polypeptide according to claim 38; or a kinase polypeptide selected from the group consisting of ACK1, FGFR4, TYRO3, wherein said kinase polypeptide comprises at least one of the germline alterations ACK1 R1038H (SEQ ID No: 546), FGFR4 V10I (SEQ ID No: 580) and TYRO3 I346N (SEQ ID No: 655), or any functional fragment thereof, with the proviso that said fragment includes the altered region, or the mutant kinase polypeptide FGFR1 V427_T428del consisting of the amino acid sequence set forth in SEQ ID NO: 577 or the mutant kinase polypeptide FGFR4 G388R consisting of the amino acid sequence set forth in SEQ ID NO:582 in a cell CSK, FGFR1, FGFR4, (b) adding a test substance to said cell; and (c) monitoring a change in cell phenotype or the interaction between said polypeptide and a natural binding partner.

60-62. (canceled)

63. A method for treating or preventing a proliferative disease or disorder by administering to a subject in need of such treatment a substance that modulates the activity of a kinase according to claim 38; or a kinase selected from the group consisting of ACK1, FGFR4, and TYRO3, wherein said kinase polypeptide comprises at least one of the germline alterations ACK1 P725L (SEQ ID No. 545), ACK1 R1038H (SEQ ID No. 546), FGFR4 V10I (SEQ ID No. 580) and TYRO3 I346N (SEQ ID No. 655), or the mutant kinase polypeptide FGFR4 G388R consisting of the amino acid sequence set forth in SEQ ID NO: 582.

64-66. (canceled)

67. A method for the diagnosis of a proliferative disease or disorder or the risk prediction of developing a proliferative disease or disorder in a subject, said disease or disorder being characterized by an abnormality in a signal transduction pathway due to aberrant protein kinase function, wherein said method comprises: (a) providing a biological sample from said subject; (b) contacting the sample with a nucleic acid probe which hybridizes under hybridization assay conditions to a target region of a nucleic acid molecule encoding a mutant kinase polypeptide according to claim 38; or a kinase polypeptide variant selected from the group consisting of ACK1, FGFR4, and TYRO3, wherein the kinase polypeptide variant encoded by said nucleic acid molecule comprises at least one of the germline alterations ACK1 P725L (SEQ ID No. 545), ACK1 R1038H (SEQ ID No. 546), FGFR4 V10I (SEQ ID No. 580), FGFR4 G388R (SEQ ID No. 582), and TYRO3 I346N (SEQ ID No. 655); and (c) detecting the presence or amount of the probe:target region hybrid as an indication of or predisposition to the disease or disorder.

68-74. (canceled)

The application's sequence listing, which the Patent Office published only in electronic form, follows.

SEQUENCE LISTING (794 sequences)

SEQ ID NO: 1 - protein, 1271 aa, Homo sapiens
MAKQPGRSVQLLKSTDVGRHSLLYLKEIGRGWFGKVFLGEVNSGISSAQVVVKELQASASVQEQMQFLEEVQPYRALKHSNLLQCLAQCAEVTPYLLVMEFCPLGDLKGYLRSCRVAESMAPDPRTLQRMACEVACGVLHLHRNNFVHSDLALRNCLLTADLTVKIGDYGLAHCKYREDYFVTADQLWVPLRWIAPELVDEVHSNLLVVDQTKSGNVWSLGVTIWELFELGTQPYPQHSDQQVLAYTVREQQLKLPKPQLQLTLSDRWYEVMQFCWLQPEQRPTAEEVHLLLSYLCAKGATEAEEEFERRWRSLRPGGGGVGPGPGAAGPMLGGVVELAAASSFPLLEQFAGDGFHADGDDVLTVTETSRGLNFEYKWEAGRGAEAFPATLSPGRTARLQELCAPDGAPPGVVPVLSAHSPSLGSEYFIRLEEAAPAAGHDPDCAGCAPSPPATADQDDDSDGSTAASLAMEPLLGHGPPVDVPWGRGDHYPRRSLARDPLCPSRSPSPSAGPLSLAEGGAEDADWGVAAFCPAFFEDPLGTSPLGSSGAPPLPLTGEDELEEVGARRAAQRGHWRSNVSANNNSGSRCPESWDPVSAGGHAEGCPSPKQTPRASPEPGYPGEPLLGLQAASAQEPGCCPGLPHLCSAQGLAPAPCLVTPSWTETASSGGDHPQAEPKLATEAEGTTGPRLPLPSVPSPSQEGAPLPSEEASAPDAPDALPDSPTPATGGEVSAIKLASALNGSSSSPEVEAPSSEDEDTAEATSGIFTDTSSDGLQARRPDVVPAFRSLQKQVGTPDSLDSLDIPSSASDGGYEVFSPSATGPSGGQPRALDSGYDTENYESPEFVLKEAQEGCEPQAFAELASEGEGPGPETRLSTSLSGLNEKNPYRDSAYFSDLEAEAEATSGPEKKCGGDRAPGPELGLPSTGQPSEQVCLRPGVSGEAQGSGPGEVLPPLLQLEGSSPEPSTCPSGLVPEPPEPQGPAKVRPGPSPSCSQFFLLTPVPLRSEGNSSEFQGPPGLLSGPAPQKRMGGPGTPRAPLRLALPGLPAALEGRPEEEEEDSEDSDESDEELRCYSVQEPSEDSEEEAPAVPVVVAESQSARNLRSLLKMPSLLSETFCEDLERKKKAVSFFDDVTVYLFDQESPTRELGEPFPGAKESPPTFLRGSPGSPSAPNRPQQADGSPNGSTAEEGGGCAWDDDFPLMTAKAAFAMALDPAAPAPAAPTPTPAPFSRFTVSPAPTSRFSITHVSDSDAESKRGPEAGAGGESKEA

SEQ ID NO: 2 - protein, 1149 aa, Homo sapiens
MGQQPGKVLGDQRRPSLPALHFIKGAGKKESSRHGGPHCNVFVEHEALQRPVASDFEPQGLSEAARWNSKENLLAGPSENDPNLFVALYDFVASGDNTLSITKGEKLRVLGYNHNGEWCEAQTKNGQGWVPSNYITPVNSLEKHSWYHGPVSRNAAEYLLSSGINGSFLVRESESSPGQRSISLRYEGRVYHYRINTASDGKLYVSSESRFNTLAELVHHHSTVADGLITTLHYPAPKRNKPTVYGVSPNYDKWEMERTDITMKHKLGGGQYGEVYEGVWKKYSLTVAVKTLKEDTMEVEEFLKEAAVMKEIKHPNLVQLLGVCTREPPFYIITEFMTYGNLLDYLRECNRQEVNAVVLLYMATQISSAMEYLEKKNFIHRDLAARNCLVGENHLVKVADFGLSRLMTGDTYTAHAEAKFPIKWTAPESLAYNKFSIKSDVWAFGVLLWEIATYGMSPYPGIDLSQVYELLEKDYRMERPEGCPEKVYELMRACWQWNPSDRPSFAEIHQAFETMFQESSISDEVEKELGKQGVRGAVSTLLQAPELPTKTRTSRRAAEHRDTTDVPEMPHSKGQGESDPLDHEPAVSPLLPRKERGPPEGGLNEDERLLPKDKKTNLFSALIKKKKKTAPTPPKRSSSFREMDGQPERRGAGEEEGRDISNGALAFTPLDTADPAKSPKPSNGAGVPNGALRESGGSGFRSPHLWKKSSTLTSSRLATGEEEGGGSSSKRFLRSCSASCVPHGAKDTEWRSVTLPRDLQSTGRQFDSSTFGGHKSEKPALPRKRAGENRSDQVTRGTVTPPPRLVKKNEEAADEVFKDIMESSPGSSPPNLTPKPLRRQVTVAPASGLPHKEEAGKGSALGTPAAAEPVTPTSKAGSGAPGGTSKGPAEESRVRRHKHSSESPGRDKGKLSRLKPAPPPPPAASAGKAGGKPSQSPSQEAAGEAVLGAKTKATSLVDAVNSDAAKPSQPGEGLKKPVLPATPKPQSAKPSGTPISPAPVPSTLPSASSALAGDQPSSTAFIPLISTRVSLRKTRQPPERIASGAITKGVVLDSTEALCLAISRNSEQMASHSAVLEAGKNLYTFCVSYVDSIQQMRNKFAFREAINKLENNLRELQICPATAGSGPAATQDFSKLLSSVKEISDIVQR

SEQ ID NO: 3 - protein, 1149 aa, Homo sapiens
MGQQPGKVLGDQRRPSLPALHFIKGAGKKESSRHGGPHCNVFVEHEALQRPVASDFEPQGLSEAARWNSKENLLAGPSENDPNLFVALYDFVASGDNTLSITKGEKLRVLGYNHNGEWCEAQTKNGQGWVPSNYITPVNSLEKHSWYHGPVSRNAAEYLLSSGINGSFLVRESESSPGQRSISLRYEGRVYHYRINTASDGKLYVSSESRFNTLAELVHHHSTVADGLITTLHYPAPKRNKPTVYGVSPNYDKWEMERTDITMKHKLGGGQYGEVYEGVWKKYSLTVAVKTLKEDTMEVEEFLKEAAVMKEIKHPNLVQLLGVCTREPPFYIITEFMTYGNLLDYLRECNRQEVNAVVLLYMATQISSAMEYLEKKNFIHRDLAARNCLVGENHLVKVADFGLSRLMTGDTYTAHAGAKFPIKWTAPESLAYNKFSIKSDVWAFGVLLWEIATYGMSPYPGIDLSQVYELLEKDYRMERPEGCPEKVYELMRACWQWNPSDRPSFAEIHQAFETMFQESSISDEVEKELGKQGVRGAVSTLLQAPELPTKTRTSRRAAEHRDTTDVPEMPHSKGQGESDPLDHEPAVSPLLPRKERGPPEGGLNEDERLLPKDKKTNLFSALIKKKKKTAPTPPKRSSSFREMDGQPERRGAGEEEGRDISNGALAFTPLDTADPAKSPKPSNGAGVPNGALRESGGSGFRSPHLWKKSSTLTSSRLATGEEEGGGSSSKRFLRSCSASCVPHGAKDTEWRSVTLPRDLQSTGRQFDSSTFGGHKSEKPALPRKRAGESRSDQVTRGTVTPPPRLVKKNEEAADEVFKDIMESSPGSSPPNLTPKPLRRQVTVAPASGLPHKEEAGKGSALGTPAAAEPVTPTSKAGSGAPGGTSKGPAEESRVRRHKHSSESPGRDKGKLSRLKPAPPPPPAASAGKAGGKPSQSPSQEAAGEAVLGAKTKATSLVDAVNSDAAKPSQPGEGLKKPVLPATPKPQSAKPSGTPISPAPVPSTLPSASSALAGDQPSSTAFIPLISTRVSLRKTRQPPERIASGAITKGVVLDSTEALCLAISRNSEQMASHSAVLEAGKNLYTFCVSYVDSIQQMRNKFAFREAINKLENNLRELQICPATAGSGPAATQDFSKLLSSVKEISDIVQR

SEQ ID NO: 4 - protein, 893 aa, Homo sapiens
MGQQPGKVLGDQRRPSLPALHFIKGAGKKESSRHGGPHCNVFVEHEALQRPVASDFEPQGLSEAARWNSKENLLAGPSENDPNLFVALYDFVASGDNTLSITKGEKLRVLGYNHNGEWCEAQTKNGQGWVPSNYITPVNSLEKHSWYHGPVSRNAAEYLLSSGINGSFLVRESESSPGQRSISLRYEGRVYHYRINTASDGKLYVSSESRFNTLAELVHHHSTVADGLITTLHYPAPKRNKPTVYGVSPNYDKWEMERTDITMKHKLGGGQYGEVYEGVWKKYSLTVAVKTLKEDTMEVEEFLKEAAVMKEIKHPNLVQLLGVCTREPPFYIITEFMTYGNLLDYLRECNRQEVNAVVLLYMATQISSAMEYLEKKNFIHRDLAARNCLVGENHLVKVADFGLSRLMTGDTYTAHAGAKFPIKWTAPESLAYNKFSIKSDVWAFGVLLWEIATYGMSPYPGIDLSQVYELLEKDYRMERPEGCPEKVYELMRACWQWNPSDRPSFAEIHQAFETMFQESSISDEVEKELGKQGVRGAVSTLLQAPELPTKTRTSRRAAEHRDTTDVPEMPHSKGQGESDPLDHEPAVSPLLPRKERGPPEGGLNEDERLLPKDKKTNLFSALIKKKKKTAPTPPKRSSSFREMDGQPERRGAGEEEGRDISNGALAFTPLDTADPAKSPKPSNGAGVPNGALRESGGSGFRSPHLWKKSSTLTSSRLATGEEEGGGSSSKRFLRSCSASCVPHGAKDTEWRSVTLPRDLQSTGRQFDSSTFGGHKSEKPALPRKRAGENRSDQVTRGTVTPPPRLVKKNEEAADEVFKDIMESSPGSSPPNLTPKPLRRQVTVAPASGLPHKEEAGKGSALGTPAAAEPVTPTSKAGSGAPGAPARAPPRSPE

SEQ ID NO: 5 - protein, 1038 aa, Homo sapiens
MQPEEGTGWLLELLSEVQLQQYFLRLRDDLNVTRLSYFEYVKNEDLEKIGMGRPGQRRLWEAVKRRKALCKRKSWMSKVFSGKRLEAEFPPHHSQSTFRKTSPAPGGPAGEGPLQSLTCLIGEKDLRLLEKLGDGSFGVVRRGEWDAPSGKTVSVAVKCLKPDVLSQPEAMDDFIREVNAMHSLDHRNLIRLYGVVLTPPMKMVTELAPLGSLLDRLRKHQGHFLLGTLSRYAVQVAEGMGYLESKRFIHRDLAARNLLLATRDLVKIGDFGLMRALPQNDDHYVMQEHRKVPFAWCAPESLKTRTFSHASDTWMFGVTLWEMFTYGQEPWIGLNGSQILHKIDKEGERLPRPEDCPQDIYNVMVQCWAHKPEDRPTFVALRDFLLEAQPTDMRALQDFEEPDKLHIQMNDVITVIEGRAENYWWRGQNTRTLCVGPFPRNVVTSVAGLSAQDISQPLQNSFIHTGHGDSDPRHCWGFPDRIDELYLGNPMDPPDLLSVELSTSRPPQHLGGVKKPTYDPVSEDQDPLSSDFKRLGLRKPGLPRGLWLAKPSARVPGTKASRGSGAEVTLIDFGEEPVVPALRPCAPSLAQLAMDACSLLDETPPQSPTRALPRPLHPTPVVDWDARPLPPPPAYDDVAQDEDDFEICSINSTLVGAGVPAGPSQGQTNYAFVPEQARPPPPLEDNLFLPPQGGGKPPSSAQTAEIFQALQQECMRQLQAPAGSPAPSPSPGGDDKPQVPPRVPIPPRPTRPHVQLSPAPPGEEETSQWPGPASPPRVPPREPLSPQGSRTPSPLVPPGSSPLPPRLSSSPGKTMPTTQSFASDPKYATPQVIQAPGPRAGPCILPIVRDGKKVSSTHYYLLPERPSYLERYQRFLREAQSPEEPTPLPVPLLLPPPSTPAPAAPTATVRPMPQAALDPKANFSTNNSNPGARPPPPRATARLPQRGCPGDGPEAGRPADKIQMAMVHGVTTEECQAALQCHGWSVQRAAQYLKVEQLFGLGLRPRGECHKVLEMFDWNLEQAGCHLLGSWGPAHHKR

SEQ ID NO: 6 - protein, 1038 aa, Homo sapiens
MQPEEGTGWLLELLSEVQLQQYFLRLRDDLNVTRLSHFEYVKNEDLEKIGMGRPGQRRLWEAVKRRKALCKRKSWMSKVFSGKRLEAEFPPHHSQSTFRKTSPAPGGPAGKGPLQSLTCLIGEKDLRLLEKLGDGSFGVVRRGEWDAPSGKTVSVAVKCLKPDVLSQPEAMDDFIREVNAMHSLDHRNLIRLYGVVLTPPMKMVTELAPLGSLLDRLRKHQGHFLLGTLSRYAVQVAEGMGYLESKRFIHRDLAARNLLLATRDLVKIGDFGLMRALPQNDDHYVMQEHRKVPFAWCAPESLKTRTFSHASDTWMFGVTLWEMFTYGQEPWIGLNGSQILHKIDKEGERLPRPEDCPQDIYNVMVQCWAHKPEDRPTFVALRDFLLEAQPTDMRALQDFEEPDKLHIQMNDVITVIEGRAENYWWRGQNTRTLCVGPFPRNVVTSVAGLSAQDISQPLQNSFIHTGHGDSDPRHCWGFPDRIDELYLGNPMDPPDLLSVELSTSRPPQHLGGVKKPTYDPVSEDQDPLSSDFKRLGLRKPGLPRGLWLAKPSARVPGTKASRGSGAEVTLIDFGEEPVVPALRPCAPSLAQLAMDACSLLDETPPQSPTRALPRPLHPTPVVDWDARPLPPPPAYDDVAQDEDDFEICSINSTLVGAGVPAGPSQGQTNYAFVPEQARPPPPLEDNLFLPPQGGGKPPSSAQTAEIFQALQQECMRQLQAPAGSPAPSPSPGGDDKPQVPPRVPIPPRPTRPHVQLSPAPPGEEETSQWPGPASPPRVPPREPLSPQGSRTPSPLVPPGSSPLPPRLSSSPGKTMPTTQSFASDPKYATPQVIQAPGPRAGPCILPIVRDGKKVSSTHYYLLPERPSYLERYQRFLREAQSPEEPTPLPVPLLLPPPSTPAPAAPTATVRPMPQAALDPKANFSTNNSNPGARPPPPRATARLPQRGCPGDGPEAGRPADKIQMAMVHGVTTEECQAALQCHGWSVQRAAQYLKVEQLFGLGLRPRGECHKVLEMFDWNLEQAGCHLLGSWGPAHHKR

SEQ ID NO: 7 - protein, 1038 aa, Homo sapiens
MQPEEGTGWLLELLSEVQLQQYFLRLRDDLNVTRLSHFEYVKNEDLEKIGMGRPGQRRLWEAVKRRKALCKRKSWMSKVFSGKRLEAEFPPHHSQSTFRKTSPAPGGPAGEGPLQSLTCLIGEKDLHLLEKLGDGSFGVVRRGEWDAPSGKTVSVAVKCLKPDVLSQPEAMDDFIREVNAMHSLDHRNLIRLYGVVLTPPMKMVTELAPLGSLLDRLRKHQGHFLLGTLSRYAVQVAEGMGYLESKRFIHRDLAARNLLLATRDLVKIGDFGLMRALPQNDDHYVMQEHRKVPFAWCAPESLKTRTFSHASDTWMFGVTLWEMFTYGQEPWIGLNGSQILHKIDKEGERLPRPEDCPQDIYNVMVQCWAHKPEDRPTFVALRDFLLEAQPTDMRALQDFEEPDKLHIQMNDVITVIEGRAENYWWRGQNTRTLCVGPFPRNVVTSVAGLSAQDISQPLQNSFIHTGHGDSDPRHCWGFPDRIDELYLGNPMDPPDLLSVELSTSRPPQHLGGVKKPTYDPVSEDQDPLSSDFKRLGLRKPGLPRGLWLAKPSARVPGTKASRGSGAEVTLIDFGEEPVVPALRPCAPSLAQLAMDACSLLDETPPQSPTRALPRPLHPTPVVDWDARPLPPPPAYDDVAQDEDDFEICSINSTLVGAGVPAGPSQGQTNYAFVPEQARPPPPLEDNLFLPPQGGGKPPSSAQTAEIFQALQQECMRQLQAPAGSPAPSPSPGGDDKPQVPPRVPIPPRPTRPHVQLSPAPPGEEETSQWPGPASPPRVPPREPLSPQGSRTPSPLVPPGSSPLPPRLSSSPGKTMPTTQSFASDPKYATPQVIQAPGPRAGPCILPIVRDGKKVSSTHYYLLPERPSYLERYQRFLREAQSPEEPTPLPVPLLLPPPSTPAPAAPTATVRPMPQAALDPKANFSTNNSNPGARPPPPRATARLPQRGCPGDGPEAGRPADKIQMAMVHGVTTEECQAALQCHGWSVQRAAQYLKVEQLFGLGLRPRGECHKVLEMFDWNLEQAGCHLLGSWGPAHHKR

SEQ ID NO: 8 - protein, 1038 aa, Homo sapiens
MQPEEGTGWLLELLSEVQLQQYFLRLRDDLNVTRLSHFEYVKNEDLEKIGMGRPGQRRLWEAVKRRKALCKRKSWMSKVFSGKRLEAEFPPHHSQSTFRKTSPAPGGPAGEGPLQSLTCLIGEKDLRLLEKLGDGSFGVVRRGEWDAPSGKTVSVAVKCLKPDVLSQPEAMDDFIREVNAMHSLDHRNLIRLYGVVLTPPMKMVTELAPLGSLLDRLRKHQGHFLLGTLSRYAVQVAEGMGYLESKRFIHRDLAARNLLLATRDLVKIGDFGLMRALPQNDDHYVMQEHRKVPFAWCAPESLKTRTFSHASDTWMFGVTLWEMFTYGQEPWIGLNGSQILHKIDKEGERLPRPEDCPQDIYNVMVQCWAHKPEDRPTFVALRDFLLEAQPTDTRALQDFEEPDKLHIQMNDVITVIEGRAENYWWRGQNTRTLCVGPFPRNVVTSVAGLSAQDISQPLQNSFIHTGHGDSDPRHCWGFPDRIDELYLGNPMDPPDLLSVELSTSRPPQHLGGVKKPTYDPVSEDQDPLSSDFKRLGLRKPGLPRGLWLAKPSARVPGTKASRGSGAEVTLIDFGEEPVVPALRPCAPSLAQLAMDACSLLDETPPQSPTRALPRPLHPTPVVDWDARPLPPPPAYDDVAQDEDDFEICSINSTLVGAGVPAGPSQGQTNYAFVPEQARPPPPLEDNLFLPPQGGGKPPSSAQTAEIFQALQQECMRQLQAPAGSPAPSPSPGGDDKPQVPPRVPIPPRPTRPHVQLSPAPPGEEETSQWPGPASPPRVPPREPLSPQGSRTPSPLVPPGSSPLPPRLSSSPGKTMPTTQSFASDPKYATPQVIQAPGPRAGPCILPIVRDGKKVSSTHYYLLPERPSYLERYQRFLREAQSPEEPTPLPVPLLLPPPSTPAPAAPTATVRPMPQAALDPKANFSTNNSNPGARPPPPRATARLPQRGCPGDGPEAGRPADKIQMAMVHGVTTEECQAALQCHGWSVQRAAQYLKVEQLFGLGLRPRGECHKVLEMFDWNLEQAGCHLLGSWGPAHHKR

SEQ ID NO: 9 - protein, 1038 aa, Homo sapiens
MQPEEGTGWLLELLSEVQLQQYFLRLRDDLNVTRLSHFEYVKNEDLEKIGMGRPGQRRLWEAVKRRKALCKRKSWMSKVFSGKRLEAEFPPHHSQSTFRKTSPAPGGPAGEGPLQSLTCLIGEKDLRLLEKLGDGSFGVVRRGEWDAPSGKTVSVAVKCLKPDVLSQPEAMDDFIREVNAMHSLDHRNLIRLYGVVLTPPMKMVTELAPLGSLLDRLRKHQGHFLLGTLSRYAVQVAEGMGYLESKRFIHRDLAARNLLLATRDLVKIGDFGLMRALPQNDDHYVMQEHRKVPFAWCAPESLKTRTFSHASDTWMFGVTLWEMFTYGQEPWIGLNGSQILHKIDKEGERLPRPEDCPQDIYNVMVQCWAHKPEDRPTFVALRDFLLEAQPTDMRALQDFEEPDKLHIQMNDVITVIEGRAENYWWRGQNTRTLCVGPFPRNVVTSVAGLSAQDISQPLQNSFIHTGHGDSDPRHCWGFPDRIDELYLGNPMDPPDLLSVELSTSRPPQHLGGVKKPTYDPVSEDQDPLSSDFKRLGLRKPGLPRGLWLAKPSARVPGTKASRGSGAEVTLIDFGEEPVVPALRPCAPSLAQLAMDACSLLDETPPQSPTRALPRPLHPTPVVDWDARPLPPPPTYDDVAQDEDDFEICSINSTLVGAGVPAGPSQGQTNYAFVPEQARPPPPLEDNLFLPPQGGGKPPSSAQTAEIFQALQQECMRQLQAPAGSPAPSPSPGGDDKPQVPPRVPIPPRPTRPHVQLSPAPPGEEETSQWPGPASPPRVPPREPLSPQGSRTPSPLVPPGSSPLPPRLSSSPGKTMPTTQSFASDPKYATPQVIQAPGPRAGPCILPIVRDGKKVSSTHYYLLPERPSYLERYQRFLREAQSPEEPTPLPVPLLLPPPSTPAPAAPTATVRPMPQAALDPKANFSTNNSNPGARPPPPRATARLPQRGCPGDGPEAGRPADKIQMAMVHGVTTEECQAALQCHGWSVQRAAQYLKVEQLFGLGLRPRGECHKVLEMFDWNLEQAGCHLLGSWGPAHHKR

SEQ ID NO: 10 - protein, 1038 aa, Homo sapiens
MQPEEGTGWLLELLSEVQLQQYFLRLRDDLNVTRLSHFEYVKNEDLEKIGMGRPGQRRLWEAVKRRKALCKRKSWMSKVFSGKRLEAEFPPHHSQSTFRKTSPAPGGPAGEGPLQSLTCLIGEKDLRLLEKLGDGSFGVVRRGEWDAPSGKTVSVAVKCLKPDVLSQPEAMDDFIREVNAMHSLDHRNLIRLYGVVLTPPMKMVTELAPLGSLLDRLRKHQGHFLLGTLSRYAVQVAEGMGYLESKRFIHRDLAARNLLLATRDLVKIGDFGLMRALPQNDDHYVMQEHRKVPFAWCAPESLKTRTFSHASDTWMFGVTLWEMFTYGQEPWIGLNGSQILHKIDKEGERLPRPEDCPQDIYNVMVQCWAHKPEDRPTFVALRDFLLEAQPTDMRALQDFEEPDKLHIQMNDVITVIEGRAENYWWRGQNTRTLCVGPFPRNVVTSVAGLSAQDISQPLQNSFIHTGHGDSDPRHCWGFPDRIDELYLGNPMDPPDLLSVELSTSRPPQHLGGVKKPTYDPVSEDQDPLSSDFKRLGLRKPGLPRGLWLAKPSARVPGTKASRGSGAEVTLIDFGEEPVVPALRPCAPSLAQLAMDACSLLDETPPQSPTRALPRPLHPTPVVDWDARPLPPPPAYDDVAQDEDDFEICSINSTLVGAGVPAGPSQGQTNYAFVPEQARPPPPLEDNLFLPPQGGGKPPNSAQTAEIFQALQQECMRQLQAPAGSPAPSPSPGGDDKPQVPPRVPIPPRPTRPHVQLSPAPPGEEETSQWPGPASPPRVPPREPLSPQGSRTPSPLVPPGSSPLPPRLSSSPGKTMPTTQSFASDPKYATPQVIQAPGPRAGPCILPIVRDGKKVSSTHYYLLPERPSYLERYQRFLREAQSPEEPTPLPVPLLLPPPSTPAPAAPTATVRPMPQAALDPKANFSTNNSNPGARPPPPRATARLPQRGCPGDGPEAGRPADKIQMAMVHGVTTEECQAALQCHGWSVQRAAQYLKVEQLFGLGLRPRGECHKVLEMFDWNLEQAGCHLLGSWGPAHHKR

SEQ ID NO: 11 - protein, 1038 aa, Homo sapiens
MQPEEGTGWLLELLSEVQLQQYFLRLRDDLNVTRLSHFEYVKNEDLEKIGMGRPGQRRLWEAVKRRKALCKRKSWMSKVFSGKRLEAEFPPHHSQSTFRKTSPAPGGPAGEGPLQSLTCLIGEKDLRLLEKLGDGSFGVVRRGEWDAPSGKTVSVAVKCLKPDVLSQPEAMDDFIREVNAMHSLDHRNLIRLYGVVLTPPMKMVTELAPLGSLLDRLRKHQGHFLLGTLSRYAVQVAEGMGYLESKRFIHRDLAARNLLLATRDLVKIGDFGLMRALPQNDDHYVMQEHRKVPFAWCAPESLKTRTFSHASDTWMFGVTLWEMFTYGQEPWIGLNGSQILHKIDKEGERLPRPEDCPQDIYNVMVQCWAHKPEDRPTFVALRDFLLEAQPTDMRALQDFEEPDKLHIQMNDVITVIEGRAENYWWRGQNTRTLCVGPFPRNVVTSVAGLSAQDISQPLQNSFIHTGHGDSDPRHCWGFPDRIDELYLGNPMDPPDLLSVELSTSRPPQHLGGVKKPTYDPVSEDQDPLSSDFKRLGLRKPGLPRGLWLAKPSARVPGTKASRGSGAEVTLIDFGEEPVVPALRPCAPSLAQLAMDACSLLDETPPQSPTRALPRPLHPTPVVDWDARPLPPPPAYDDVAQDEDDFEICSINSTLVGAGVPAGPSQGQTNYAFVPEQARPPPPLEDNLFLPPQGGGKPPSSAQTAEIFQALQQECMRQLQAPAGSPAPSPSLGGDDKPQVPPRVPIPPRPTRPHVQLSPAPPGEEETSQWPGPASPPRVPPREPLSPQGSRTPSPLVPPGSSPLPPRLSSSPGKTMPTTQSFASDPKYATPQVIQAPGPRAGPCILPIVRDGKKVSSTHYYLLPERPSYLERYQRFLREAQSPEEPTPLPVPLLLPPPSTPAPAAPTATVRPMPQAALDPKANFSTNNSNPGARPPPPRATARLPQRGCPGDGPEAGRPADKIQMAMVHGVTTEECQAALQCHGWSVQRAAQYLKVEQLFGLGLRPRGECHKVLEMFDWNLEQAGCHLLGSWGPAHHKR

SEQ ID NO: 12 - protein, 1038 aa, Homo sapiens
MQPEEGTGWLLELLSEVQLQQYFLRLRDDLNVTRLSHFEYVKNEDLEKIGMGRPGQRRLWEAVKRRKALCKRKSWMSKVFSGKRLEAEFPPHHSQSTFRKTSPAPGGPAGEGPLQSLTCLIGEKDLRLLEKLGDGSFGVVRRGEWDAPSGKTVSVAVKCLKPDVLSQPEAMDDFIREVNAMHSLDHRNLIRLYGVVLTPPMKMVTELAPLGSLLDRLRKHQGHFLLGTLSRYAVQVAEGMGYLESKRFIHRDLAARNLLLATRDLVKIGDFGLMRALPQNDDHYVMQEHRKVPFAWCAPESLKTRTFSHASDTWMFGVTLWEMFTYGQEPWIGLNGSQILHKIDKEGERLPRPEDCPQDIYNVMVQCWAHKPEDRPTFVALRDFLLEAQPTDMRALQDFEEPDKLHIQMNDVITVIEGRAENYWWRGQNTRTLCVGPFPRNVVTSVAGLSAQDISQPLQNSFIHTGHGDSDPRHCWGFPDRIDELYLGNPMDPPDLLSVELSTSRPPQHLGGVKKPTYDPVSEDQDPLSSDFKRLGLRKPGLPRGLWLAKPSARVPGTKASRGSGAEVTLIDFGEEPVVPALRPCAPSLAQLAMDACSLLDETPPQSPTRALPRPLHPTPVVDWDARPLPPPPAYDDVAQDEDDFEICSINSTLVGAGVPAGPSQGQTNYAFVPEQARPPPPLEDNLFLPPQGGGKPPSSAQTAEIFQALQQECMRQLQAPAGSPAPSPSPGGDDKPQVPPRVPIPPWPTRPHVQLSPAPPGEEETSQWPGPASPPRVPPREPLSPQGSRTPSPLVPPGSSPLPPRLSSSPGKTMPTTQSFASDPKYATPQVIQAPGPRAGPCILPIVRDGKKVSSTHYYLLPERPSYLERYQRFLREAQSPEEPTPLPVPLLLPPPSTPAPAAPTATVRPMPQAALDPKANFSTNNSNPGARPPPPRATARLPQRGCPGDGPEAGRPADKIQMAMVHGVTTEECQAALQCHGWSVQRAAQYLKVEQLFGLGLRPRGECHKVLEMFDWNLEQAGCHLLGSWGPAHHKR

SEQ ID NO: 13 - protein, 1038 aa, Homo sapiens
MQPEEGTGWLLELLSEVQLQQYFLRLRDDLNVTRLSHFEYVKNEDLEKIGMGRPGQRRLWEAVKRRKALCKRKSWMSKVFSGKRLEAEFPPHHSQSTFRKTSPAPGGPAGEGPLQSLTCLIGEKDLRLLEKLGDGSFGVVRRGEWDAPSGKTVSVAVKCLKPDVLSQPEAMDDFIREVNAMHSLDHRNLIRLYGVVLTPPMKMVTELAPLGSLLDRLRKHQGHFLLGTLSRYAVQVAEGMGYLESKRFIHRDLAARNLLLATRDLVKIGDFGLMRALPQNDDHYVMQEHRKVPFAWCAPESLKTRTFSHASDTWMFGVTLWEMFTYGQEPWIGLNGSQILHKIDKEGERLPRPEDCPQDIYNVMVQCWAHKPEDRPTFVALRDFLLEAQPTDMRALQDFEEPDKLHIQMNDVITVIEGRAENYWWRGQNTRTLCVGPFPRNVVTSVAGLSAQDISQPLQNSFIHTGHGDSDPRHCWGFPDRIDELYLGNPMDPPDLLSVELSTSRPPQHLGGVKKPTYDPVSEDQDPLSSDFKRLGLRKPGLPRGLWLAKPSARVPGTKASRGSGAEVTLIDFGEEPVVPALRPCAPSLAQLAMDACSLLDETPPQSPTRALPRPLHPTPVVDWDARPLPPPPAYDDVAQDEDDFEICSINSTLVGAGVPAGPSQGQTNYAFVPEQARPPPPLEDNLFLPPQGGGKPPSSAQTAEIFQALQQECMRQLQAPAGSPAPSPSPGGDDKPQVPPRVPIPPRPTRPHVQLSPAPPGEEETSQWPGPASPPRVPPREPLSPQGSRTPSPLVPPGSSPLPPRLSSSPGKTMPTTQSFASDPKYATPQVIQAPGPRAGPCILPIVRDGKKVSSTHYYLLPERPSYLERYQRFLREAQSPEEPTPLPVPLLLPPPSTPAPAAPTATVRPMPQAALDPKANFSTNNSNPGARPPPPRATARLPQRDCPGDGPEAGRPADKIQMAMVHGVTTEECQAALQCHGWSVQRAAQYLKVEQLFGLGLRPRGECHKVLEMFDWNLEQAGCHLLGSWGPAHHKR

SEQ ID NO: 14 - protein, 1038 aa, Homo sapiens
MQPEEGTGWLLELLSEVQLQQYFLRLRDDLNVTRLSHFEYVKNEDLEKIGMGRPGQRRLWEAVKRRKALCKRKSWMSKVFSGKRLEAEFPPHHSQSTFRKTSPAPGGPAGEGPLQSLTCLIGEKDLRLLEKLGDGSFGVVRRGEWDAPSGKTVSVAVKCLKPDVLSQPEAMDDFIREVNAMHSLDHRNLIRLYGVVLTPPMKMVTELAPLGSLLDRLRKHQGHFLLGTLSRYAVQVAEGMGYLESKRFIHRDLAARNLLLATRDLVKIGDFGLMRALPQNDDHYVMQEHRKVPFAWCAPESLKTRTFSHASDTWMFGVTLWEMFTYGQEPWIGLNGSQILHKIDKEGERLPRPEDCPQDIYNVMVQCWAHKPEDRPTFVALRDFLLEAQPTDMRALQDFEEPDKLHIQMNDVITVIEGRAENYWWRGQNTRTLCVGPFPRNVVTSVAGLSAQDISQPLQNSFIHTGHGDSDPRHCWGFPDRIDELYLGNPMDPPDLLSVELSTSRPPQHLGGVKKPTYDPVSEDQDPLSSDFKRLGLRKPGLPRGLWLAKPSARVPGTKASRGSGAEVTLIDFGEEPVVPALRPCAPSLAQLAMDACSLLDETPPQSPTRALPRPLHPTPVVDWDARPLPPPPAYDDVAQDEDDFEICSINSTLVGAGVPAGPSQGQTNYAFVPEQARPPPPLEDNLFLPPQGGGKPPSSAQTAEIFQALQQECMRQLQAPAGSPAPSPSPGGDDKPQVPPRVPIPPRPTRPHVQLSPAPPGEEETSQWPGPASPPRVPPREPLSPQGSRTPSPLVPPGSSPLPPRLSSSPGKTMPTTQSFASDPKYATPQVIQAPGPRAGPCILPIVRDGKKVSSTHYYLLPERPSYLERYQRFLREAQSPEEPTPLPVPLLLPPPSTPAPAAPTATVRPMPQAALDPKANFSTNNSNPGARPPPPRATARLPQRGCPGDGPEAGRPADKIQMAMVHGVTTEECQAALQCHGWNVQRAAQYLKVEQLFGLGLRPRGECHKVLEMFDWNLEQAGCHLLGSWGPAHHKR

SEQ ID NO: 15 - protein, 1620 aa, Homo sapiens
MGAIGLLWLLPLLLSTAAVGSGMGTGQRAGSPAAGPPLQPREPLSYSRLQRKSLAVDFVVPSLFRVYARDLLLPPSSSELKAGRPEARGSLALDCAPLLRLLGPAPGVSWTAGSPAPAEARTLSRVLKGGSVRKLRRAKQLVLELGEEAILEGCVGPPGEAAVGLLQFNLSELFSWWIRQGEGRLRIRLMPEKKASEVGREGRLSAAIRASQPRLLFQIFGTGHSSLESPTNMPSPSPDYFTWNLTWIMKDSFPFLSHRSRYGLECSFDFPCELEYSPPLHDLRNQSWSWRRIPSEEASQMDLLDGPGAERSKEMPRGSFLLLNTSADSKHTILSPWMRSSSEHCTLAVSVHRHLQPSGRYIAQLLPHNEAAREILLMPTPGKHGWTVLQGRIGRPDNPFRVALEYISSGNRSLSAVDFFALKNCSEGTSPGSKMALQSSFTCWNGTVLQLGQACDFHQDCAQGEDESQMCRKLPVGFYCNFEDGFCGWTQGTLSPHTPQWQVRTLKDARFQDHQDHALLLSTTDVPASESATVTSATFPAPIKSSPCELRMSWLIRGVLRGNVSLVLVENKTGKEQGRMVWHVAAYEGLSLWQWMVLPLLDVSDRFWLQMVAWWGQGSRAIVAFDNISISLDCYLTISGEDKILQNTAPKSRNLFERNPNKELKPGENSPRQTPIFDPTVHWLFTTCGASGPHGPTQAQCNNAYQNSNLSVEVGSEGPLKGIQIWKVPATDTYSISGYGAAGGKGGKNTMMRSHGVSVLGIFNLEKDDMLYILVGQQGEDACPSTNQLIQKVCIGENNVIEEEIRVNRSVHEWAGGGGGGGGATYVFKMKDGVPVPLIIAAGGGGRAYGAKTDTFHPERLENNSSVLGLNGNSGAAGGGGGWNDNTSLLWAGKSLQEGATGGHSCPQAMKKWGWETRGGFGGGGGGCSSGGGGGGYIGGNAASNNDPEMDGEDGVSFISPLGILYTPALKVMEGHGEVNIKHYLNCSHCEVDECHMDPESHKVICFCDHGTVLAEDGVSCIVSPTPEPHLPLSLILSVVTSALVAALVLAFSGIMIVYRRKHQELQAMQMELQSPEYKLSKLRTSTIMTDYNPNYCFAGKTSSISDLKEVPRKNITLIRGLGHGAFGEVYEGQVSGMPNDPSPLQVAVKTLPEVCSEQDELDFLMEALIISKFNHQNIVRCIGVSLQSLPRFILLELMAGGDLKSFLRETRPRPSQPSSLAMLDLLHVARDIACGCQYLEENHFIHRDIAARNCLLTCPGPGRVAKIGDFGMARDIYRASYYRKGGCAMLPVKWMPPEAFMEGIFTSKTDTWSFGVLLWEIFSLGYMPYPSKSNQEVLEFVTSGGRMDPPKNCPGPVYRIMTQCWQHQPEDRPNFAIILERIEYCTQDPDVINTALPIEYGPLVEEEEKVPVRPKDPEGVPPLLVSQQAKREEERSPAAPPPLPTTSSGKAAKKPTAAEISVRVPRGPAVEGGHVNMAFSQSNPPSELHKVHGSRNKPTSLWNPTYGSWFTEKPTKKNNPIAKKEPHDRGNLGLEGSCTVPPNVATGRLPGASLLLEPSSLTANMKEVPLFRLRHFPCVNVNYGYQQQGLPLEAATAPGAGHYEDTILKSKNSMNQPGP

SEQ ID NO: 16 - protein, 1182 aa, Homo sapiens
MGQQVGRVGEAPGLQQPQPRGIRGSSAARPSGRRRDPAGRTTETGFNIFTQHDHFASCVEDGFEGDKTGGSSPEALHRPYGCDVEPQALNEAIRWSSKENLLGATESDPNLFVALYDFVASGDNTLSITKGEKLRVLGYNQNGEWSEVRSKNGQGWVPSNYITPVNSLEKHSWYHGPVSRSAAEYLLSSLINGSFLVRESESSPGQLSISLRYEGRVYHYRINTTADGKVYVTAESRFSTLAELVHHHSTVADGLVTTLHYPAPKCNKPTVYGVSPIHDKWEMERTDITMKHKLGGGQYGEVYVGVWKKYSLTVAVKTLKEDTMEVEEFLKKAAVMKEIKHPNLVQLLGVCTLEPPFYIVTEYMPYGNLLDYLRECNREEVTAVVLLYMATQISSAMEYLEKKNFIHRDLAARNCLVGENHVVKVADFGLSRLMTGDTYTAHAGAKFPIKWTAPESLAYNTFSIKSDVWAFGVLLWEIATYGMSPYPGIDLSQVYDLLEKGYRMEQPEGCPPKVYELMRACWKWSPADRPSFAETHQAFETMFHDSSISEEVAEELGRAASSSSVVPYLPRLPILPSKTRTLKKQVENKENIEGAQDATENSASSLAPGFIRGAQASSGSPALPRKQRDKSPSSLLEDAKETCFTRDRKGGFFSSFMKKRNAPTPPKRSSSFREMENQPHKKYELTGNFSSVASLQHADGFSFTPAQQEANLVPPKCYGGSFAQRNLCNDDGGGGGGSGTAGGGWSGITGFFTPRLIKKTLGLRAGKPTASDDTSKPFPRSNSTSSMSSGLPEQDRMAMTLPRNCQRSKLQLERTVSTSSQPEENVDRANDMLPKKSEESAAPSRERPKAKLLPRGATALPLRTPSGDLAITEKDPPGVGVAGVAAAPKGKEKNGGARLGMAGVPEDGEQPGWPSPAKAAPVLPTTHNHKVPVLISPTLKHTPADVQLIGTDSQGNKFKLLSEHQVTSSGDKDRPRRVKPKCAPPPPPVMRLLQHPSICSDPTEEPTALTAGQSTSETQEGGKKAALGAVPISGKAGRPVMPPPQVPLPTSSISPAKMANGTAGTKVALRKTKQAAEKISADKISKEALLECADLLSSALTEPVPNSQLVDTGHQLLDYCSGYVDCIPQTRNKFAFREAVSKLELSLQELQVSSAAAGVPGTNPVLNNLLSCVQEISDVVQR

SEQ ID NO: 17 - protein, 1182 aa, Homo sapiens
MGQQVGRVGEAPGLQQPQPRGIRGSSAARPSGRRRDPAGRTTETGFNIFTQHDHFASCVEDGFEGDKTGGSSPEALHRPYGCDVEPQALNEAIRWSSKENLLGATESDPNLFVALYDFVASGDNTLSITKGEKLRVLGYNQNGEWSEVRSKNGQGWVPSNYITPVNSLEKHSWYHGPVSRSAAEYLLSSLINGSFLVRESESSPGQLSISLRYEGRVYHYRINTTADGKVYVTAESRFSTLAELVHHHSTVADGLVTTLHYPAPKCNKPTVYGVSPIHDKWEMERTDITMKHKLGGGQYGEVYVGVWKKYSLTVAVKTLKEDTMEVEEFLKEAAVMKEIKHPNLAQLLGVCTLEPPFYIVTEYMPYGNLLDYLRECNREEVTAVVLLYMATQISSAMEYLEKKNFIHRDLAARNCLVGENHVVKVADFGLSRLMTGDTYTAHAGAKFPIKWTAPESLAYNTFSIKSDVWAFGVLLWEIATYGMSPYPGIDLSQVYDLLEKGYRMEQPEGCPPKVYELMRACWKWSPADRPSFAETHQAFETMFHDSSISEEVAEELGRAASSSSVVPYLPRLPILPSKTRTLKKQVENKENIEGAQDATENSASSLAPGFIRGAQASSGSPALPRKQRDKSPSSLLEDAKETCFTRDRKGGFFSSFMKKRNAPTPPKRSSSFREMENQPHKKYELTGNFSSVASLQHADGFSFTPAQQEANLVPPKCYGGSFAQRNLCNDDGGGGGGSGTAGGGWSGITGFFTPRLIKKTLGLRAGKPTASDDTSKPFPRSNSTSSMSSGLPEQDRMAMTLPRNCQRSKLQLERTVSTSSQPEENVDRANDMLPKKSEESAAPSRERPKAKLLPRGATALPLRTPSGDLAITEKDPPGVGVAGVAAAPKGKEKNGGARLGMAGVPEDGEQPGWPSPAKAAPVLPTTHNHKVPVLISPTLKHTPADVQLIGTDSQGNKFKLLSEHQVTSSGDKDRPRRVKPKCAPPPPPVMRLLQHPSICSDPTEEPTALTAGQSTSETQEGGKKAALGAVPISGKAGRPVMPPPQVPLPTSSISPAKMANGTAGTKVALRKTKQAAEKISADKISKEALLECADLLSSALTEPVPNSQLVDTGHQLLDYCSGYVDCIPQTRNKFAFREAVSKLELSLQELQVSSAAAGVPGTNPVLNNLLSCVQEISDVVQR

SEQ ID NO: 18 - protein, 1182 aa, Homo sapiens
MGQQVGRVGEAPGLQQPQPRGIRGSSAARPSGRRRDPAGRTTETGFNIFTQHDHFASCVEDGFEGDKTGGSSPEALHRPYGCDVEPQALNEAIRWSSKENLLGATESDPNLFVALYDFVASGDNTLSITKGEKLRVLGYNQNGEWSEVRSKNGQGWVPSNYITPVNSLEKHSWYHGPVSRSAAEYLLSSLINGSFLVRESESSPGQLSISLRYEGRVYHYRINTTADGKVYVTAESRFSTLAELVHHHSTVADGLVTTLHYPAPKCNKPTVYGVSPIHDKWEMERTDITMKHKLGGGQYGEVYVGVWKKYSLTVAVKTLKEDTMEVEEFLKEAAVMKEIKHPNLVQLLGVCTLEPPFYIVTEYMPYGNLLDYLRECNREEVTAVVLLYMATQISSAMEYLEKKNFIHRDLAARNCLVGENHVVKVADFGLSRLMTGDTYTAHAGAKFPIRWTAPESLAYNTFSIKSDVWAFGVLLWEIATYGMSPYPGIDLSQVYDLLEKGYRMEQPEGCPPKVYELMRACWKWSPADRPSFAETHQAFETMFHDSSISEEVAEELGRAASSSSVVPYLPRLPILPSKTRTLKKQVENKENIEGAQDATENSASSLAPGFIRGAQASSGSPALPRKQRDKSPSSLLEDAKETCFTRDRKGGFFSSFMKKRNAPTPPKRSSSFREMENQPHKKYELTGNFSSVASLQHADGFSFTPAQQEANLVPPKCYGGSFAQRNLCNDDGGGGGGSGTAGGGWSGITGFFTPRLIKKTLGLRAGKPTASDDTSKPFPRSNSTSSMSSGLPEQDRMAMTLPRNCQRSKLQLERTVSTSSQPEENVDRANDMLPKKSEESAAPSRERPKAKLLPRGATALPLRTPSGDLAITEKDPPGVGVAGVAAAPKGKEKNGGARLGMAGVPEDGEQPGWPSPAKAAPVLPTTHNHKVPVLISPTLKHTPADVQLIGTDSQGNKFKLLSEHQVTSSGDKDRPRRVKPKCAPPPPPVMRLLQHPSICSDPTEEPTALTAGQSTSETQEGGKKAALGAVPISGKAGRPVMPPPQVPLPTSSISPAKMANGTAGTKVALRKTKQAAEKISADKISKEALLECADLLSSALTEPVPNSQLVDTGHQLLDYCSGYVDCIPQTRNKFAFREAVSKLELSLQELQVSSAAAGVPGTNPVLNNLLSCVQEISDVVQR

SEQ ID NO: 19 - protein, 1182 aa, Homo sapiens
MGQQVGRVGEAPGLQQPQPRGIRGSSAARPSGRRRDPAGRTTETGFNIFTQHDHFASCVEDGFEGDKTGGSSPEALHRPYGCDVEPQALNEAIRWSSKENLLGATESDPNLFVALYDFVASGDNTLSITKGEKLRVLGYNQNGEWSEVRSKNGQGWVPSNYITPVNSLEKHSWYHGPVSRSAAEYLLSSLINGSFLVRESESSPGQLSISLRYEGRVYHYRINTTADGKVYVTAESRFSTLAELVHHHSTVADGLVTTLHYPAPKCNKPTVYGVSPIHDKWEMERTDITMKHKLGGGQYGEVYVGVWKKYSLTVAVKTLKEDTMEVEEFLKEAAVMKEIKHPNLVQLLGVCTLEPPFYIVTEYMPYGNLLDYLRECNREEVTAVVLLYMATQISSAMEYLEKKNFIHRDLAARNCLVGENHVVKVADFGLSRLMTGDTYTAHAGAKFPIKWTAPESLAYNTFSIKSDVWAFGVLLWEIATYGMSPYPGIDLSQVYDLLEKGYRMEQPEGCPPKVYELMRACWKWSPADRPSFAETHQAFETMFHDSSISEEVAEELGRAASSSSVVPYLPRLPILPSKTRTLKKQVENKENIEGAQDATENSASSLAPGFIRGAQASSGSPALPRKQRDKSPSSLLEDAKETCFTRDRKGGFFSSFIKKRNAPTPPKRSSSFREMENQPHKKYELTGNFSSVASLQHADGFSFTPAQQEANLVPPKCYGGSFAQRNLCNDDGGGGGGSGTAGGGWSGITGFFTPRLIKKTLGLRAGKPTASDDTSKPFPRSNSTSSMSSGLPEQDRMAMTLPRNCQRSKLQLERTVSTSSQPEENVDRANDMLPKKSEESAAPSRERPKAKLLPRGATALPLRTPSGDLAITEKDPPGVGVAGVAAAPKGKEKNGGARLGMAGVPEDGEQPGWPSPAKAAPVLPTTHNHKVPVLISPTLKHTPADVQLIGTDSQGNKFKLLSEHQVTSSGDKDRPRRVKPKCAPPPPPVMRLLQHPSICSDPTEEPTALTAGQSTSETQEGGKKAALGAVPISGKAGRPVMPPPQVPLPTSSISPAKMANGTAGTKVALRKTKQAAEKISADKISKEALLECADLLSSALTEPVPNSQLVDTGHQLLDYCSGYVDCIPQTRNKFAFREAVSKLELSLQELQVSSAAAGVPGTNPVLNNLLSCVQEISDVVQR

SEQ ID NO: 20 - protein, 1182 aa, Homo sapiens
MGQQVGRVGEAPGLQQPQPRGIRGSSAARPSGRRRDPAGRTTETGFNIFTQHDHFASCVEDGFEGDKTGGSSPEALHRPYGCDVEPQALNEAIRWSSKENLLGATESDPNLFVALYDFVASGDNTLSITKGEKLRVLGYNQNGEWSEVRSKNGQGWVPSNYITPVNSLEKHSWYHGPVSRSAAEYLLSSLINGSFLVRESESSPGQLSISLRYEGRVYHYRINTTADGKVYVTAESRFSTLAELVHHHSTVADGLVTTLHYPAPKCNKPTVYGVSPIHDKWEMERTDITMKHKLGGGQYGEVYVGVWKKYSLTVAVKTLKEDTMEVEEFLKEAAVMKEIKHPNLVQLLGVCTLEPPFYIVTEYMPYGNLLDYLRECNREEVTAVVLLYMATQISSAMEYLEKKNFIHRDLAARNCLVGENHVVKVADFGLSRLMTGDTYTAHAGAKFPIKWTAPESLAYNTFSIKSDVWAFGVLLWEIATYGMSPYPGIDLSQVYDLLEKGYRMEQPEGCPPKVYELMRACWKWSPADRPSFAETHQAFETMFHDSSISEEVAEELGRAASSSSVVPYLPRLPILPSKTRTLKKQVENKENIEGAQDATENSASSLAPGFIRGAQASSGSPALPRKQRDKSPSSLLEDAKETCFTRDRKGGFFSSFMKKRNAPTTPKRSSSFREMENQPHKKYELTGNFSSVASLQHADGFSFTPAQQEANLVPPKCYGGSFAQRNLCNDDGGGGGGSGTAGGGWSGITGFFTPRLIKKTLGLRAGKPTASDDTSKPFPRSNSTSSMSSGLPEQDRMAMTLPRNCQRSKLQLERTVSTSSQPEENVDRANDMLPKKSEESAAPSRERPKAKLLPRGATALPLRTPSGDLAITEKDPPGVGVAGVAAAPKGKEKNGGARLGMAGVPEDGEQPGWPSPAKAAPVLPTTHNHKVPVLISPTLKHTPADVQLIGTDSQGNKFKLLSEHQVTSSGDKDRPRRVKPKCAPPPPPVMRLLQHPSICSDPTEEPTALTAGQSTSETQEGGKKAALGAVPISGKAGRPVMPPPQVPLPTSSISPAKMANGTAGTKVALRKTKQAAEKISADKISKEALLECADLLSSALTEPVPNSQLVDTGHQLLDYCSGYVDCIPQTRNKFAFREAVSKLELSLQELQVSSAAAGVPGTNPVLNNLLSCVQEISDVVQR

SEQ ID NO: 21 - protein, 1182 aa, Homo sapiens
MGQQVGRVGEAPGLQQPQPRGIRGSSAARPSGRRRDPAGRTTETGFNIFTQHDHFASCVEDGFEGDKTGGSSPEALHRPYGCDVEPQALNEAIRWSSKENLLGATESDPNLFVALYDFVASGDNTLSITKGEKLRVLGYNQNGEWSEVRSKNGQGWVPSNYITPVNSLEKHSWYHGPVSRSAAEYLLSSLINGSFLVRESESSPGQLSISLRYEGRVYHYRINTTADGKVYVTAESRFSTLAELVHHHSTVADGLVTTLHYPAPKCNKPTVYGVSPIHDKWEMERTDITMKHKLGGGQYGEVYVGVWKKYSLTVAVKTLKEDTMEVEEFLKEAAVMKEIKHPNLVQLLGVCTLEPPFYIVTEYMPYGNLLDYLRECNREEVTAVVLLYMATQISSAMEYLEKKNFIHRDLAARNCLVGENHVVKVADFGLSRLMTGDTYTAHAGAKFPIKWTAPESLAYNTFSIKSDVWAFGVLLWEIATYGMSPYPGIDLSQVYDLLEKGYRMEQPEGCPPKVYELMRACWKWSPADRPSFAETHQAFETMFHDSSISEEVAEELGRAASSSSVVPYLPRLPILPSKTRTLKKQVENKENIEGAQDATENSASSLAPGFIRGAQASSGSPALPRKQRDKSPSSLLEDAKETCFTRDRKGGFFSSFMKKRNAPTPPKCSSSFREMENQPHKKYELTGNFSSVASLQHADGFSFTPAQQEANLVPPKCYGGSFAQRNLCNDDGGGGGGSGTAGGGWSGITGFFTPRLIKKTLGLRAGKPTASDDTSKPFPRSNSTSSMSSGLPEQDRMAMTLPRNCQRSKLQLERTVSTSSQPEENVDRANDMLPKKSEESAAPSRERPKAKLLPRGATALPLRTPSGDLAITEKDPPGVGVAGVAAAPKGKEKNGGARLGMAGVPEDGEQPGWPSPAKAAPVLPTTHNHKVPVLISPTLKHTPADVQLIGTDSQGNKFKLLSEHQVTSSGDKDRPRRVKPKCAPPPPPVMRLLQHPSICSDPTEEPTALTAGQSTSETQEGGKKAALGAVPISGKAGRPVMPPPQVPLPTSSISPAKMANGTAGTKVALRKTKQAAEKISADKISKEALLECADLLSSALTEPVPNSQLVDTGHQLLDYCSGYVDCIPQTRNKFAFREAVSKLELSLQELQVSSAAAGVPGTNPVLNNLLSCVQEISDVVQR

SEQ ID NO: 22 - protein, 1182 aa, Homo sapiens
MGQQVGRVGEAPGLQQPQPRGIRGSSAARPSGRRRDPAGRTTETGFNIFTQHDHFASCVEDGFEGDKTGGSSPEALHRPYGCDVEPQALNEAIRWSSKENLLGATESDPNLFVALYDFVASGDNTLSITKGEKLRVLGYNQNGEWSEVRSKNGQGWVPSNYITPVNSLEKHSWYHGPVSRSAAEYLLSSLINGSFLVRESESSPGQLSISLRYEGRVYHYRINTTADGKVYVTAESRFSTLAELVHHHSTVADGLVTTLHYPAPKCNKPTVYGVSPIHDKWEMERTDITMKHKLGGGQYGEVYVGVWKKYSLTVAVKTLKEDTMEVEEFLKEAAVMKEIKHPNLVQLLGVCTLEPPFYIVTEYMPYGNLLDYLRECNREEVTAVVLLYMATQISSAMEYLEKKNFIHRDLAARNCLVGENHVVKVADFGLSRLMTGDTYTAHAGAKFPIKWTAPESLAYNTFSIKSDVWAFGVLLWEIATYGMSPYPGIDLSQVYDLLEKGYRMEQPEGCPPKVYELMRACWKWSPADRPSFAETHQAFETMFHDSSISEEVAEELGRAASSSSVVPYLPRLPILPSKTRTLKKQVENKENIEGAQDATENSASSLAPGFIRGAQASSGSPALPRKQRDKSPSSLLEDAKETCFTRDRKGGFFSSFMKKRNAPTPPKRSSSFREMENQPHKKYELTGNFSSVASLHHADGFSFTPAQQEANLVPPKCYGGSFAQRNLCNDDGGGGGGSGTAGGGWSGITGFFTPRLIKKTLGLRAGKPTASDDTSKPFPRSNSTSSMSSGLPEQDRMAMTLPRNCQRSKLQLERTVSTSSQPEENVDRANDMLPKKSEESAAPSRERPKAKLLPRGATALPLRTPSGDLAITEKDPPGVGVAGVAAAPKGKEKNGGARLGMAGVPEDGEQPGWPSPAKAAPVLPTTHNHKVPVLISPTLKHTPADVQLIGTDSQGNKFKLLSEHQVTSSGDKDRPRRVKPKCAPPPPPVMRLLQHPSICSDPTEEPTALTAGQSTSETQEGGKKAALGAVPISGKAGRPVMPPPQVPLPTSSISPAKMANGTAGTKVALRKTKQAAEKISADKISKEALLECADLLSSALTEPVPNSQLVDTGHQLLDYCSGYVDCIPQTRNKFAFREAVSKLELSLQELQVSSAAAGVPGTNPVLNNLLSCVQEISDVVQR

SEQ ID NO: 23 - protein, 1182 aa, Homo sapiens
MGQQVGRVGEAPGLQQPQPRGIRGSSAARPSGRRRDPAGRTTETGFNIFTQHDHFASCVEDGFEGDKTGGSSPEALHRPYGCDVEPQALNEAIRWSSKENLLGATESDPNLFVALYDFVASGDNTLSITKGEKLRVLGYNQNGEWSEVRSKNGQGWVPSNYITPVNSLEKHSWYHGPVSRSAAEYLLSSLINGSFLVRESESSPGQLSISLRYEGRVYHYRINTTADGKVYVTAESRFSTLAELVHHHSTVADGLVTTLHYPAPKCNKPTVYGVSPIHDKWEMERTDITMKHKLGGGQYGEVYVGVWKKYSLTVAVKTLKEDTMEVEEFLKEAAVMKEIKHPNLVQLLGVCTLEPPFYIVTEYMPYGNLLDYLRECNREEVTAVVLLYMATQISSAMEYLEKKNFIHRDLAARNCLVGENHVVKVADFGLSRLMTGDTYTAHAGAKFPIKWTAPESLAYNTFSIKSDVWAFGVLLWEIATYGMSPYPGIDLSQVYDLLEKGYRMEQPEGCPPKVYELMRACWKWSPADRPSFAETHQAFETMFHDSSISEEVAEELGRAASSSSVVPYLPRLPILPSKTRTLKKQVENKENIEGAQDATENSASSLAPGFIRGAQASSGSPALPRKQRDKSPSSLLEDAKETCFTRDRKGGFFSSFMKKRNAPTPPKRSSSFREMENQPHKKYELTGNFSSVASLQHADGFSFTPAQQEANLVPPKCYGGSFAQRNLCNDDGGGGGGSGTAGGGWSGITGFFTPRLIKKTLGLRAGKPTASDDTSKPFPRSNSTSSMSSGLPEQDRMAMTLPRNCQRSKLQLERTVSTSSQPEENVDRANDMLPKKSEESAAPSRERPKAKLLPRGATALPLRTPSGDLAITEKDPPGVGVAGVAAAPKGKEKNGGARLGMAGVPEDGEQPGWPSPAKAAPVLPTTHNHRVPVLISPTLKHTPADVQLIGTDSQGNKFKLLSEHQVTSSGDKDRPRRVKPKCAPPPPPVMRLLQHPSICSDPTEEPTALTAGQSTSETQEGGKKAALGAVPISGKAGRPVMPPPQVPLPTSSISPAKMANGTAGTKVALRKTKQAAEKISADKISKEALLECADLLSSALTEPVPNSQLVDTGHQLLDYCSGYVDCIPQTRNKFAFREAVSKLELSLQELQVSSAAAGVPGTNPVLNNLLSCVQEISDVVQR

SEQ ID NO: 24 - protein, 1182 aa, Homo sapiens
MGQQVGRVGEAPGLQQPQPRGIRGSSAARPSGRRRDPAGRTTETGFNIFTQHDHFASCVEDGFEGDKTGGSSPEALHRPYGCDVEPQALNEAIRWSSKENLLGATESDPNLFVALYDFVASGDNTLSITKGEKLRVLGYNQNGEWSEVRSKNGQGWVPSNYITPVNSLEKHSWYHGPVSRSAAEYLLSSLINGSFLVRESESSPGQLSISLRYEGRVYHYRINTTADGKVYVTAESRFSTLAELVHHHSTVADGLVTTLHYPAPKCNKPTVYGVSPIHDKWEMERTDITMKHKLGGGQYGEVYVGVWKKYSLTVAVKTLKEDTMEVEEFLKEAAVMKEIKHPNLVQLLGVCTLEPPFYIVTEYMPYGNLLDYLRECNREEVTAVVLLYMATQISSAMEYLEKKNFIHRDLAARNCLVGENHVVKVADFGLSRLMTGDTYTAHAGAKFPIKWTAPESLAYNTFSIKSDVWAFGVLLWEIATYGMSPYPGIDLSQVYDLLEKGYRMEQPEGCPPKVYELMRACWKWSPADRPSFAETHQAFETMFHDSSISEEVAEELGRAASSSSVVPYLPRLPILPSKTRTLKKQVENKENIEGAQDATENSASSLAPGFIRGAQASSGSPALPRKQRDKSPSSLLEDAKETCFTRDRKGGFFSSFMKKRNAPTPPKRSSSFREMENQPHKKYELTGNFSSVASLQHADGFSFTPAQQEANLVPPKCYGGSFAQRNLCNDDGGGGGGSGTAGGGWSGITGFFTPRLIKKTLGLRAGKPTASDDTSKPFPRSNSTSSMSSGLPEQDRMAMTLPRNCQRSKLQLERTVSTSSQPEENVDRANDMLPKKSEESAAPSRERPKAKLLPRGATALPLRTPSGDLAITEKDPPGVGVAGVAAAPKGKEKNGGARLGMAGVPEDGEQPGWPSPAKAAPVLPTTHNHKVPVLISPTLKHTPADVQLIGTDSQGNKFKLLSEHQVTFSGDKDRPRRVKPKCAPPPPPVMRLLQHPSICSDPTEEPTALTAGQSTSETQEGGKKAALGAVPISGKAGRPVMPPPQVPLPTSSISPAKMANGTAGTKVALRKTKQAAEKISADKISKEALLECADLLSSALTEPVPNSQLVDTGHQLLDYCSGYVDCIPQTRNKFAFREAVSKLELSLQELQVSSAAAGVPGTNPVLNNLLSCVQEISDVVQR

SEQ ID NO: 25 - protein, 1182 aa, Homo sapiens
MGQQVGRVGEAPGLQQPQPRGIRGSSAARPSGRRRDPAGRTTETGFNIFTQHDHFASCVEDGFEGDKTGGSSPEALHRPYGCDVEPQALNEAIRWSSKENLLGATESDPNLFVALYDFVASGDNTLSITKGEKLRVLGYNQNGEWSEVRSKNGQGWVPSNYITPVNSLEKHSWYHGPVSRSAAEYLLSSLINGSFLVRESESSPGQLSISLRYEGRVYHYRINTTADGKVYVTAESRFSTLAELVHHHSTVADGLVTTLHYPAPKCNKPTVYGVSPIHDKWEMERTDITMKHKLGGGQYGEVYVGVWKKYSLTVAVKTLKEDTMEVEEFLKEAAVMKEIKHPNLVQLLGVCTLEPPFYIVTEYMPYGNLLDYLRECNREEVTAVVLLYMATQISSAMEYLEKKNFIHRDLAARNCLVGENHVVKVADFGLSRLMTGDTYTAHAGAKFPIKWTAPESLAYNTFSIKSDVWAFGVLLWEIATYGMSPYPGIDLSQVYDLLEKGYRMEQPEGCPPKVYELMRACWKWSPADRPSFAETHQAFETMFHDSSISEEVAEELGRAASSSSVVPYLPRLPILPSKTRTLKKQVENKENIEGAQDATENSASSLAPGFIRGAQASSGSPALPRKQRDKSPSSLLEDAKETCFTRDRKGGFFSSFMKKRNAPTPPKRSSSFREMENQPHKKYELTGNFSSVASLQHADGFSFTPAQQEANLVPPKCYGGSFAQRNLCNDDGGGGGGSGTAGGGWSGITGFFTPRLIKKTLGLRAGKPTASDDTSKPFPRSNSTSSMSSGLPEQDRMAMTLPRNCQRSKLQLERTVSTSSQPEENVDRANDMLPKKSEESAAPSRERPKAKLLPRGATALPLRTPSGDLAITEKDPPGVGVAGVAAAPKGKEKNGGARLGMAGVPEDGEQPGWPSPAKAAPVLPTTHNHKVPVLISPTLKHTPADVQLIGTDSQGNKFKLLSEHQVTSSGDKDRPRRVKPKCAPPPPPVMRLLHHPSICSDPTEEPTALTAGQSTSETQEGGKKAALGAVPISGKAGRPVMPPPQVPLPTSSISPAKMANGTAGTKVALRKTKQAAEKISADKISKEALLECADLLSSALTEPVPNSQLVDTGHQLLDYCSGYVDCIPQTRNKFAFREAVSKLELSLQELQVSSAAAGVPGTNPVLNNLLSCVQEISDVVQR

SEQ ID NO: 26 - protein, 894 aa, Homo sapiens
MAWRCPRMGRVPLAWCLALCGWACMAPRGTQAEESPFVGNPGNITGARGLTGTLRCQLQVQGEPPEVHWLRDGQILELADSTQTQVPLGEDEQDDWIVVSQLRITSLQLSDTGQYQCLVFLGHQTFVSQPGYVGLEGLPYFLEEPEDRTVAANTPFNLSCQAQGPPEPVDLLWLQDAVPLATAPGHGPQRSLHVPGLNKTSSFSCEAHNAKGVTTSRTATITVLPQQPRNLHLVSRQPTELEVAWTPGLSGIYPLTHCTLQAVLSDDGMGIQAGEPDPPEEPLTSQASVPPHQLRLGSLHPHTPYHIRVACTSSQGPSSWTHWLPVETPEGVPLGPPENISATRNGSQAFVHWQEPRAPLQGTLLGYRLAYQGQDTPEVLMDIGLRQEVTLELQGDGSVSNLTVCVAAYTAAGDGPWSLPVPLEAWRPGQAQPVHQLVKEPSTPAFSWPWWYVLLGAVVAAACVLILALFLVHRRKKETRYGEVFEPTVERGELVVRYRVRKSYSRRTTEATLNSLGISEELKEKLRDVMVDRHKVALGKTLGEGEFGAVMEGQLNQDDSILKVAVKTIKIAICTRSELEDFLSEAVCMKEFDHPNVMRLIGVCFQGSERESFPAPVVILPFMKHGDLHSFLLYSRLGDQPVYLPTQMLVKFMADIASGMEYLSTKRFIHRDLAARNCMLNENMSVCVADFGLSKKIYNGDYYRQGRIAKMPVKWIAIESLADRVYTSKSDVWSFGVTMWEIATRGQTPYPGVENSEIYDYLRQGNRLKQPADCLDGLYALMSRCWELNPQDRPSFTELREDLENTLKALPPAQEPDEILYVNMDEGGGYPEPPGAAGGADPPTQPDPKDSCSCLTAAEVHPAGRYVLCPSTTPSPAQPADRGSPAAPGQEDGA

SEQ ID NO: 27 - protein, 894 aa, Homo sapiens
MAWRCPRMGRVPLAWCLALCGWACMAPRGTQAEESPFVGNPGNITGARGLTGTLRCQLQVQGEPPEVHWLRDGQILELADSTQTQVPLGEDEQDDWIVVSQLRITSLQLSDTGQYQCLVFLGHQTFVSQPGYVGLEGLPYFLEEPEDRTVAANTPFNLSCQAQGPPEPVDLLWLQDAVPLATAPGHGPQRSLHVPGLNKTSSFSCEAHNAKGVTTSRTATITVLPQQPRNLHLVSRQPTELEVAWTPGLSGIYPLTHCTLQAVLSDDGMGIQAGEPDPPEEPLTSQASVPPHQLRLGSLHPHTPYHIRVACTSSQGPSSWTHWLPVETPEGVPLGPPENISATRNGSQAFVHWQEPRAPLQGTLLGYRLAYQGQDTPEVLMDIGLRQEVTLELQGDGSVSNLTVCVAAYTAAGDGPWSLPVPLEAWRPGQAQPVHQLVKEPSTPAFSWPWWYVLLGAVVAAACVLILALFLVHRRKKETRYGEVFEPTVERGELVVRYRVRKSYSRRTTEATLNSLGISEELKEKLRDVMVDRHKVALGKTLGEGEFGAVMEGQLNQDDSILKVAVKTMKIAICTRSELEDFLSEAVCKKEFDHPNVMRLIGVCFQGSERESFPAPVVILPFMKHGDLHSFLLYSRLGDQPVYLPTQMLVKFMADIASGMEYLSTKRFIHRDLAARNCMLNENMSVCVADFGLSKKIYNGDYYRQGRIAKMPVKWIAIESLADRVYTSKSDVWSFGVTMWEIATRGQTPYPGVENSEIYDYLRQGNRLKQPADCLDGLYALMSRCWELNPQDRPSFTELREDLENTLKALPPAQEPDEILYVNMDEGGGYPEPPGAAGGADPPTQPDPKDSCSCLTAAEVHPAGRYVLCPSTTPSPAQPADRGSPAAPGQEDGA

SEQ ID NO: 28 - protein, 894 aa, Homo sapiens
MAWRCPRMGRVPLAWCLALCGWACMAPRGTQAEESPFVGNPGNITGARGLTGTLRCQLQVQGEPPEVHWLRDGQILELADSTQTQVPLGEDEQDDWIVVSQLRITSLQLSDTGQYQCLVFLGHQTFVSQPGYVGLEGLPYFLEEPEDRTVAANTPFNLSCQAQGPPEPVDLLWLQDAVPLATAPGHGPQRSLHVPGLNKTSSFSCEAHNAKGVTTSRTATITVLPQQPRNLHLVSRQPTELEVAWTPGLSGIYPLTHCTLQAVLSDDGMGIQAGEPDPPEEPLTSQASVPPHQLRLGSLHPHTPYHIRVACTSSQGPSSWTHWLPVETPEGVPLGPPENISATRNGSQAFVHWQEPRAPLQGTLLGYRLAYQGQDTPEVLMDIGLRQEVTLELQGDGSVSNLTVCVAAYTAAGDGPWSLPVPLEAWRPGQAQPVHQLVKEPSTPAFSWPWWYVLLGAVVAAACVLILALFLVHRRKKETRYGEVFEPTVERGELVVRYRVRKSYSRRTTEATLNSLGISEELKEKLRDVMVDRHKVALGKTLGEGEFGAVMEGQLNQDDSILKVAVKTMKIAICTRSELEDFLSEAVCMKEFDHPNVMRLIGVCFQGSERESFPAPVVILPFMKHGDLHSFLLYSRLGDQPVYLPTQMLVKFMADIASGMEYLSTKRFIHRDLAARNCMLNENMSVCVADFGLSKKIYNGDYYRQGRIAKMPVKWIAIESLADRVYTSKSDVWSFGVTMWEIATRGQTPYPGVENSEIYDYLRQGNRLKQPADCLDGLYALMSRCWELNPQDRPSFTELREDLENTLKALPPAQEPDEILYVNMDEGGGYPEPPVAAGGADPPTQPDPKDSCSCLTAAEVHPAGRYVLCPSTTPSPAQPADRGSPAAPGQEDGA

SEQ ID NO: 29 - protein, 675 aa, Homo sapiens
MDTKSILEELLLKRSQQKKKMSPNNYKERLFVLTKTNLSYYEYDKMKRGSRKGSIEIKKIRCVEKVNLEEQTPVERQYPFQIVYKDGLLYVYASNEESRSQWLKALQKEIRGNPHLLVKYHSGFFVDGKFLCCQQSCKAAPGCTLWEAYDNLHTAVNEEKHRVPTFPDRVLKIPRAVPVLKMDAPSSSTTLAQYDNESKKNYGSQPPSSSTSLAQYDSNSKKIYGSQPNFNMQYIPREDFPDWWQVRKLKSSSSSEDVASSNQKERNVNHTTSKISWEFPESSSSEEEENLDDYDWFAGNISRSQSEQLLRQKGKEGAFMVRNSSQVGMYTVSLFSKAVNDKKGTVKHYHVHTNAENKLYLAENYCFDSIPKLIHYHQHNSAGMITRLRHPVSTKANKVPDSVSLGNGIWELKREEITLLKELGSGQFGVVQLGKWKGQYDVAVKMIKEGSMSEDEFFQEAQTMMKLSHPKLVKFYGVCSKEYPIYIVTEYISNGCLLNYLRSHGKGLEPSQLLEMCYDVCEGMAFLESHQFIHRDLAARNCLVDRDLCVKVSDFGMTRYVLDDQYVSSVGTKFPVKWSAPEVFHYFKYSSKSDVWAFGILMWEVFSLGKQPYDLYDNSQVVLKVSQGHRLYRPHLASDTIYQIMYSCWHELPEKRPTFQQLLSSIEPLREKDKH

SEQ ID NO: 30 - protein, 674 aa, Homo sapiens
MDTKSILEELLLKRSQQKKKMSPNNYKERLFVLTKTNLSYYEYDKMKRGSRKGSIEIKKIRCVEKVNLEEQTPVERQYPFQIVYKDGLLYVYASNEESRSQWLKALQKEIRGNPHLLVKYHSGFFVDGKFLCCQQSCKAAPGCTLWEAYANLHTAVNEEKHRVPTFPDRVLKIPRAVPVLKMDAPSSSTTLAQYDNESKKNYGSQPPSSSTSLAQYDSNSKKIYGSQPNFNMQYIPREDFPDWWQVRKLKSSSSEDVASSNQKERNVNHTTSKISWEFPESSSSEEEENLDDYDWFAGNISRSQSEQLLRQKGKEGAFMVRNSSQVGMYTVSLFSKAVNDKKGTVKHYHVHTNAENKLYLAENYCFDSIPKLIHYHQHNSAGMITRLRHPVSTKANKVPDSVSLGNGIWELKREEITLLKELGSGQFGVVQLGKWKGQYDVAVKMIKEGSMSEDEFFQEAQTMMKLSHPKLVKFYGVCSKEYPIYIVTEYISNGCLLNYLRSHGKGLEPSQLLEMCYDVCEGMAFLESHQFIHRDLAARNCLVDRDLCVKVSDFGMTRYVLDDQYVSSVGTKFPVKWSAPEVFHYFKYSSKSDVWAFGILMWEVFSLGKQPYDLYDNSQVVLKVSQGHRLYRPHLASDTIYQIMYSCWHELPEKRPTFQQLLSSIEPLREKDKH

SEQ ID NO: 31 - protein, 675 aa, Homo sapiens
MDTKSILEELLLKRSQQKKKMSPNNYKERLFVLTKTNLSYYEYDKMKRGSRKGSIEIKKIRCVEKVNLEEQTPVERQYPFQIVYKDGLLYVYASNEESRSQWLKALQKEIRGNPHLLVKYHSGFFVDGKFLCCQQSCKAAPGCTLWEAYANLHTAVNEEKHRVPTFPDRVLKIPRAVPVLKMDAPSSSTTLAQYDNESKKNYGSQPPSSSTSLAQYDSNSKKIYGSQPNFNMQYIPREDFPDWWQVRKLKSSSSSEDVASSNQKERIVNHTTSKISWEFPESSSSEEEENLDDYDWFAGNISRSQSEQLLRQKGKEGAFMVRNSSQVGMYTVSLFSKAVNDKKGTVKHYHVHTNAENKLYLAENYCFDSIPKLIHYHQHNSAGMITRLRHPVSTKANKVPDSVSLGNGIWELKREEITLLKELGSGQFGVVQLGKWKGQYDVAVKMIKEGSMSEDEFFQEAQTMMKLSHPKLVKFYGVCSKEYPIYIVTEYISNGCLLNYLRSHGKGLEPSQLLEMCYDVCEGMAFLESHQFIHRDLAARNCLVDRDLCVKVSDFGMTRYVLDDQYVSSVGTKFPVKWSAPEVFHYFKYSSKSDVWAFGILMWEVFSLGKQPYDLYDNSQVVLKVSQGHRLYRPHLASDTIYQIMYSCWHELPEKRPTFQQLLSSIEPLREKDKH

SEQ ID NO: 32 - protein, 451 aa, Homo sapiens
MVSRDQAHLGPKYVGLWDFKSRTDEELSFRAGDVFHVARKEEQWWWATLLDEAGGAVAQGYVPHNYLAERETVESEPWFFGCISRSEAVRRLQAEGNATGAFLIRVSEKPSADYVLSVRDTQAVRHYKIWRRAGGRLHLNEAVSFLSLPELVNYHRAQSLSHGLRLAAPCRKHEPEPLPHWDDWERPREEFTLCRKLGSGYFGEVFEGLWKDRVQVAIKVISRDNLLHQQMLQSEIQAMKKLRHKHILALYAVVSVGDPVYIITELMAKGSLLELLRDSDEKVLPVSELLDIAWQVAEGMCYLESQNYIHRDLAARNILVGENTLCKVGDFGLARLIKEDVYLSHDHNIPYKWTAPEALSRGHYSTKSDVWSFGILLHEMFSRGQVPYPGMSNHEAFLRVDAGYRMPCPLECPPSVHKLMLTCWCRDPEQRPCFKALRERLSSFTSYENPT

SEQ ID NO: 33 - protein, 659 aa, Homo sapiens
MAAVILESIFLKRSQQKKKTSPLNFKKRLFLLTVHKLSYYEYDFERGRRGSKKGSIDVEKITCVETVVPEKNPPPERQIPRRGEESSEMEQISIIERFPYPFQVVYDEGPLYVFSPTEELRKRWIHQLKNVIRYNSDLVQKYHPCFWIDGQYLCCSQTAKNAMGCQILENRNGSLKPGSSHRKTKKPLPPTPEEDQILKKPLPPEPAAAPVSTSELKKVVALYDYMPMNANDLQLRKGDEYFILEESNLPWWRARDKNGQEGYIPSNYVTEAEDSIEMYEWYSKHMTRSQAEQLLKQEGKEGGFIVRDSSKAGKYTVSVFAKSTGDPQGVIRHYVVCSTPQSQYYLAEKHLFSTIPELINYHQHNSAGLISRLKYPVSQQNKNAPSTAGLGYGSWEIDPKDLTFLKELGTGQFGVVKYGKWRGQYDVAIKMIKEGSMSEDEFIEEAKVMMNLSHEKLVQLYGVCTKQRPIFIITEYMANGCLLNYLREIRHRFQTQQLLEMCKDVCEAMEYLESKQFLHRDLAARNCLVNDQGVVKVSDFGLSRYVLDDEYTSSVGSKFPVRWSPPEVLMYSKFSSKSDIWAFGVLMWEIYSLGKMPYERFTNSETAEHIAQGLRLYRPHLASEKVYTIMYSCWHEKADERPTFKILLSNILDVMDEES

SEQ ID NO: 34 - protein, 659 aa, Homo sapiens
MAAVILESIFLKRSQQKKKTSPLNFKKRLFLLTVHKLSYYEYDFERGRRGSKKGSIDVEKITCVETVVPEKNPPPERQIPRRGEESSEMEQISIIERFPYPFQVVYDEGPLYVFSPTEELRKRWIHQLKNVIRYNSDLVQKYHPCFWIDGQYLCCSQTAKNAMGCQILENRNGSLKPGSSHRKTKKPLPPTPEEDQILKKPLPPEPAAAPVSTSELKKVVALYDYMPMNANDLQLRKGDEYFILEESNLPWWRARDKNGQEGYIPSNYVTEAEDSIEMYEWYSKHMTRSQAEQLLKQEGKEGGFIVRDSSKAGKYTVSVFAKSTGDPQGVIRHYVVCSTPQSQYYLAEKHLFSTIPELINYHQHNSAGLISRLKYPVSQQNKNAPSTAGLGYGSWEIDPKDLTFLKELGTGQFGVVKYGKWRGQYDVAIKMIKEGSMSEDEFIEEAKVMMNLSHEKLVQLYGVCTKQRPIFIITEYMANGCLLNYLREMRHRFQTQQLLEMCKDVCEAMEYLESKQFLHRDLAARNCLVNDQGVVKVSDFGLSRYVLDDEYTSSVGSKFPVRWSPPEVLMYSKFSSKSDIWAFGVLMCEIYSLGKMPYERFTNSETAEHIAQGLRLYRPHLASEKVYTIMYSCWHEKADERPTFKILLSNILDVMDEES

SEQ ID NO: 35 - protein, 835 aa, Homo sapiens
MGNYKSRPTQTCTDEWKKKVSESYVITIERLEDDLQIKEKELTELRNIFGSDEAFSKVNLNYRTENGLSLLHLCCICGGKKSHIRTLMLKGLRPSRLTRNGFTALHLAVYKDNAELITSLLHSGADIQQVGYGGLTALHIATIAGHLEAADVLLQHGANVNIQDAVFFTPLHIAAYYGHEQVTRLLLKFGADVNVSGEVGDRPLHLASAKGFLNIAKLLMEEGSKADVNAQDNEDHVPLHFCSRFGHHDIVKYLLQSDFEVQPHVVNIYGDTPLHLACYNGKFEVAKEIIQISGTESLTKENIFSETAFHSACTYGKSIDLVKFLLDQNVININHQGRDGHTGLHSACYHGHIRLVQFLLDNGADMNLVACDPSRSSGEKDEQTCLMWAYEKGHDAIVTLLKHYKRPQDELPCNEYSQPGGDGSYVSVPSPLGKIKSMTKEKADILLLRAGLPSHFHLQLSEIEFHEIIGSGSFGKVYKGRCRNKIVAIKRYRANTYCSKSDVDMFCREVSILCQLNHPCVIQFVGACLNDPSQFAIVTQYISGGSLFSLLHEQKRILDLQSKLIIAVDVAKGMEYLHNLTQPIIHRDLNSHNILLYEDGHAVVADFGESRFLQSLDEDNMTKQPGNLRWMAPEVFTQCTRYTIKADVFSYALCLWEILTGEIPFAHLKPAAAAADMAYHHIRPPIGYSIPKPISSLLIRGWNACPEGRPEFSEVVMKLEECLCNIELMSPASSNSSGSLSPSSSSDCLVNRGGPGRSHVAALRSRFELEYALNARSYAALSQSAGQYSSQGLSLEEMKRSLQYTPIDKYGYVSDPMSSMHFHSCRNSSSFEDSS

SEQ ID NO: 36 - protein, 835 aa, Homo sapiens
MGNYKSRPTQTCTDEWKKKVSESYVITIERLEDDLQIKEKELTELRNIFGSDEAFSKVNLNYRTENGLSLLHLCCICGGKKSHIRTLMLKGLRPSRLTRNGFTALHLAVYKDNAELITSLLHSGADIQQVGYGGLTALHIATIAGHLEAADVLLQHGANVNIQDAVFFTPLHIAAYYGHEQVTRLLLKFGADVNVSGEVGDRPLHLASAKGFLNIAKLLMEEGSKADVNAQDNEDHVPLHFCSRFGHHDIVKYLLQSDLEVQPHVVNIYGDTPLHLACYNGKFEVAKEIIQISGTESLTKENIFSETAFHSACTYGKSIDLVKFLLDQNVININHQGRDGHTGLHSACYHGHIRLVQFLLDNGADMNLVACDPSRSSGEKDEQTCLMWAYEKGHDAIVTLLKHYKRPQDELPCNEYSQPGGDGSYVSVPSPLGKIKSMTKEKADILLLRAGLPSHFHLQLSEIEFHEIIGSGSFGKVYKGRCRNKIVAIKRYRANTYCSKSDVDMFCREVSILCQLNHPCVIQFVGACLNDPSQFAIVTQYISGGSLFSLLHEQKRILDLQSKLIIAVDVAKGMEYLHNLTQPIIHRDLNSHNILLYEDGHAVVADFGESRFLQSLDEDNMTKQPGNLRWMAPEVFTQCTRYTIKADVFSYALCLWEILTGEIPFAHLKPAAAAADMAYHHIRPPIGYSIPKPISSLLIRGWNACPEGRPEFSEVVMKLEECLCNIELMSPASSNSSGSLSPSSSSDCLVNRGGPGRSHVAALRSRFELEYALNARSYAALSQSAGQYSSQGLSLEEMKRSLQYTPIDKYGYVSDPMSSMHFHSCRNSSSFEDSS

SEQ ID NO: 37 - protein, 835 aa, Homo sapiens; identical to SEQ ID NO: 36

SEQ ID NO: 38 - protein, 835 aa, Homo sapiens; identical to SEQ ID NO: 36

SEQ ID NO: 39 - protein, 835 aa, Homo sapiens; identical to SEQ ID NO: 36

SEQ ID NO: 40 - protein, 835 aa, Homo sapiens
MGNYKSRPTQTCTDEWKKKVSESYVITIERLEDDLQIKEKELTELRNIFGSDEAFSKVNLNYRTENGLSLLHLCCICGGKKSHIRTLMLKGLRPSRLTRNGFTALHLAVYKDNAELITSLLHSGADIQQVGYGGLTALHIATIAGHLEAADVLLQHGANVNIQDAVFFTPLHIAAYYGHEQVTRLLLKFGADVNVSGEVGDRPLHLASAKGFLNIAKLLMEEGSKADVNAQDNEDHVPLHFCSRFGHHDIVKYLLQSDLEVQPHVVNIYGDTPLHLACYNGKFEVAKEIIQISGTESLTKENIFSETAFHSACTYGKSIDLVKFLLDQNVININHQGRDGHTGLHSACYHGHIRLVQFLLDNGADMNLVACDPSRSSGEKDEQTCLMWAYEKGHDAIVTLLKHYKRPQDELPCNEYSQPGGDGSYVSVPSPLGKIKSMTKEKADILLLRAGLPSHFHLQLSEIEFHEIIGSGSFGKVYKGRCRNKIVAIKRYRANTYCSKSDVDMFCREVSILCQLNHPCVIQFVGACLNDPSQFAIVTQYISGGSLFSLLHEQKRILDLQSKLIIAVDVAKGMEYLHNLTQPIIHRDLNSHNILLYEDGHAVVADFGESRFLQSLDEDNMTKQPGNLRWMAPEVFTQCTRYTIKADVFSYALCLWEILTGKIPFAHLKPAAAAADMAYHHIRPPIGYSIPKPISSLLIRGWNACPEGRPEFSEVVMKLEECLCNIELMSPASSNSSGSLSPSSSSDCLVNRGGPGRSHVAALRSRFELEYALNARSYAALSQSAGQYSSQGLSLEEMKRSLQYTPIDKYGYVSDPMSSMHFHSCRNSSSFEDSS

SEQ ID NO: 41 - protein, 835 aa, Homo sapiens; identical to SEQ ID NO: 36

SEQ ID NO: 42 - protein, 835 aa, Homo sapiens; identical to SEQ ID NO: 36

SEQ ID NO: 43 - protein, 835 aa, Homo sapiens
MGNYKSRPTQTCTDEWKKKVSESYVITIERLEDDLQIKEKELTELRNIFGSDEAFSKVNLNYRTENGLSLLHLCCICGGKKSHIRTLMLKGLRPSRLTRNGFTALHLAVYKDNAELITSLLHSGADIQQVGYGGLTALHIATIAGHLEAADVLLQHGANVNIQDAVFFTPLHIAAYYGHEQVTRLLLKFGADVNVSGEVGDRPLHLASAKGFLNIAKLLMEEGSKADVNAQDNEDHVPLHFCSRFGHHDIVKYLLQSDLEVQPHVVNIYGDTPLHLACYNGKFEVAKEIIQISGTESLTKENIFSETAFHSACTYGKSIDLVKFLLDQNVININHQGRDGHTGLHSACYHGHIRLVQFLLDNGADMNLVACDPSRSSGEKDEQTCLMWAYEKGHDAIVTLLKHYKRPQDELPCNEYSQPGGDGSYVSVPSPLGKIKSMTKEKADILLLRAGLPSHFHLQLSEIEFHEIIGSGSFGKVYKGRCRNKIVAIKRYRANTYCSKSDVDMFCREVSILCQLNHPCVIQFVGACLNDPSQFAIVTQYISGGSLFSLLHEQKRILDLQSKLIIAVDVAKGMEYLHNLTQPIIHRDLNSHNILLYEDGHAVVADFGESRFLQSLDEDNMTKQPGNLRWMAPEVFTQCTRYTIKADVFSYALCLWEILTGEIPFAHLKPAAAAADMAYHHIRPPIGYSIPKPISSLLIRGWNACPEGRPEFSEVVMKLEECLCNIELMSPASSNSSGSLSPSSSSDCLVNLGGPGRSHVAALRSRFELEYALNARSYAALSQSAGQYSSQGLSLEEMKRSLQYTPIDKYGYVSDPMSSMHFHSCRNSSSFEDSS

SEQ ID NO: 44 - protein, 835 aa, Homo sapiens; identical to SEQ ID NO: 36

SEQ ID NO: 45 - protein, 835 aa, Homo sapiens; identical to SEQ ID NO: 36

SEQ ID NO: 46 - protein, 835 aa, Homo sapiens; identical to SEQ ID NO: 36

SEQ ID NO: 47 - protein, 835 aa, Homo sapiens; identical to SEQ ID NO: 36

SEQ ID NO: 48 - protein, 1070 aa, Homo sapiens
MGAARGSPARPRRLPLLSVLLLPLLGGTQTAIVFIKQPSSQDALQGRRALLRCEVEAPGPVHVYWLLDGAPVQDTERRFAQGSSLSFAAVDRLQDSGTFQCVARDNVTGEEARSANASFNIKWIEAGPVVLKHPASEAEIQPQTQVTLRCHIDGHPRPTYQWFRDGTPLSDGQSNHTVSSKERNLTLRPAGPEHSGLYSCCAHSAFGQACSSQNFTLSIADESFARVVLAPQDVVVARYEEAMFHCQFSAQPPPSLQWLFEDETPITNRSRPPHLRRATVFANGSLLLTQVRPRNAGIYRCIGQGQRGPPIILEATLHLAEIEDMPLFEPRVFTAGSEERVTCLPPKGLPEPSVWWEHAGVRLPTHGRVYQKGHELVLANIAESDAGVYTCHAANLAGQRRQDVNITVATVPSWLKKPQDSQLEEGKPGYLDCLTQATPKPTVVWYRNQMLISEDSRFEVFKNGTLRINSVEVYDGTWYRCMSSTPAGSIEAQARVQVLEKLKFTPPPQPQQCMEFDKEATVPCSATGREKPTIKWERADGSSLPEWVTDNAGTLHFARVTRDDAGNYTCIASNGPQGQIRAHVQLTVAVFITFKVEPERTTVYQGHTALLQCEAQGDPKPLIQWKGKDRILDPTKLGPRMHIFQNGSLVIHDVAPEDSGRYTCIAGNSCNIKHTEAPLYVVDKPVPEESEGPGSPPPYKMIQTIGLSVGAAVAYIIAVLGLMFYCKKRCKAKRLQKQPEGEEPEMECLNGGPLQNGQPSAEIQEEVALTSLGSGPAATNKRHSTSDKMHFPRSSLQPITTLGKSEFGEVFLAKAQGLEEGVAETLVLVKSLQSKDEQQQLDFRRELEMFGKLNHANVVRLLGLCREAEPHYMVLEYVDLGDLKQFLRISKSKDEKLKSQPLSTKQKVALCTQVALGMEHLSNNRFVHKDLAARNCLVSAQRQVKVSALGLSKDVYNSEYYHFRQAWVPLRWMSPEAILEGDFSTKSDVWAFGVLMWEVFTHGEMPHGGQADDEVLADLQAGKARLPQPEGCPSKLYRLMQRCWALSPKDRPSFSEIASALGDSTVDSKP

SEQ ID NO: 49 - protein, 1070 aa, Homo sapiens
MGAARGSPARPRRLPLLSVLLLPLLGGTQTAIVFIKQPSSQDALQGRRALLRCEVEAPGPVHVYWLLDGAPVQDTERRFAQGSSLSFAAVDRLQDSGTFQCVARDDVTGEEARSANASFNIKWIEAGPVVLKHPASEAEIQPQTQVTLRCHIDGHPRPTYQWFRDGTPLSDGQSNHTVSSKERNLTLRPAGPEHSGLYSCCAHSAFGQACSSQNFTLSIADESFARVVLAPQDVVVARYEEAMFHCQFSAQPPPSLQWLFEDETPITNRSRPPHLRRATVFANGSLLLTQVRPRNAGIYRCIGQGQRGPPIILEATLHLAEIEDMPLFEPRVFTAGSEERVTCLPPKGLPEPSVWWEHAGVRLPTHGRVYQKGHELVLANIAESDAGVYTCHAANLAGQRRQDVNITVASVPSWLKKPQDSQLEEGKPGYLDCLTQATPKPTVVWYRNQMLISEDSRFEVFKNGTLRINSVEVYDGTWYRCMSSTPAGSIEAQARVQVLEKLKFTPPPQPQQCMEFDKEATVPCSATGREKPTIKWERADGSSLPEWVTDNAGTLHFARVTRDDAGNYTCIASNGPQGQIRAHVQLTVAVFITFKVEPERTTVYQGHTALLQCEAQGDPKPLIQWKGKDRILDPTKLGPRMHIFQNGSLVIHDVAPEDSGRYTCIAGNSCNIKHTEAPLYVVDKPVPEESEGPGSPPPYKMIQTIGLSVGAAVAYIIAVLGLMFYCKKRCKAKRLQKQPEGEEPEMECLNGGPLQNGQPSAEIQEEVALTSLGSGPAATNKRHSTSDKMHFPRSSLQPITTLGKSEFGEVFLAKAQGLEEGVAETLVLVKSLQSKDEQQQLDFRRELEMFGKLNHANVVRLLGLCREAEPHYMVLEYVDLGDLKQFLRISKSKDEKLKSQPLSTKQKVALCTQVALGMEHLSNNRFVHKDLAARNCLVSAQRQVKVSALGLSKDVYNSEYYHFRQAWVPLRWMSPEAILEGDFSTKSDVWAFGVLMWEVFTHGEMPHGGQADDEVLADLQAGKARLPQPEGCPSKLYRLMQRCWALSPKDRPSFSEIASALGDSTVDSKP

SEQ ID NO: 50 - protein, 1070 aa, Homo sapiens
MGAARGSPARPRRLPLLSVLLLPLLGGTQTAIVFIKQPSSQDALQGRRALLRCEVEAPGPVHVYWLLDGAPVQDTERRFAQGSSLSFAAVDRLQDSGTFQCVARDDVTGEEARSANASFNIKWIEAGPVVLKHPASEAEIQPQTQVTLRCHIDGHPRPTYQWFRDGTPLSDGQSNHTVSSKERNLTLRPAGPEHSGLYSCCAHSAFGQACSSQNFTLSIADESFARVVLAPQDVVVARYEEAMFHCQFSAQPPPSLQWLFEDETPITNRSRPPHLRRATVFANGSLLLTQVRPRNAGIYRCIGQGQRGPPIILEATLHLAEIEDMPLFEPRVFTAGSEERVTCLPPKGLPEPSVWWEHAGVRLPTHGRVYQKGHELVLANIAESDAGVYTCHAANLAGQRRQDVNITVATVPSWLKKPQDSQLEEGKPGYLDCLTQATPKPTVVWYRNQMLISEDSRFEVFKNGTLRINSVEVYDGTWYRCMSSTPAGSIEAQARVQVLEKLKFTPPPQPQQCMEFDKEATVPCSATGREKPTIKWERADGSSLPEWVTDNAGTLHFARVTRDDAGNYTCIASNGPQGQIRAHVQLTVAVFITFKVEPERTTVYQGHTALLQCEAQGDPKPLIQWKGKDRILDPTKLGPRMHIFQNGSLVIHDVAPEDSGRYTCIAGNSCNIKHTEAPLYVVDKPVPEESEGPGSPPPYKMIQTIGLSVGAAVAYIIAVLGLMFYCKKRCKAKRLQKQPEGEEPELECLNGGPLQNGQPSAEIQEEVALTSLGSGPAATNKRHSTSDKMHFPRSSLQPITTLGKSEFGEVFLAKAQGLEEGVAETLVLVKSLQSKDEQQQLDFRRELEMFGKLNHANVVRLLGLCREAEPHYMVLEYVDLGDLKQFLRISKSKDEKLKSQPLSTKQKVALCTQVALGMEHLSNNRFVHKDLAARNCLVSAQRQVKVSALGLSKDVYNSEYYHFRQAWVPLRWMSPEAILEGDFSTKSDVWAFGVLMWEVFTHGEMPHGGQADDEVLADLQAGKARLPQPEGCPSKLYRLMQRCWALSPKDRPSFSEIASALGDSTVDSKP

SEQ ID NO: 51 - protein, 1070 aa, Homo sapiens
MGAARGSPARPRRLPLLSVLLLPLLGGTQTAIVFIKQPSSQDALQGRRALLRCEVEAPGPVHVYWLLDGAPVQDTERRFAQGSSLSFAAVDRLQDSGTFQCVARDDVTGEEARSANASFNIKWIEAGPVVLKHPASEAEIQPQTQVTLRCHIDGHPRPTYQWFRDGTPLSDGQSNHTVSSKERNLTLRPAGPEHSGLYSCCAHSAFGQACSSQNFTLSIADESFARVVLAPQDVVVARYEEAMFHCQFSAQPPPSLQWLFEDETPITNRSRPPHLRRATVFANGSLLLTQVRPRNAGIYRCIGQGQRGPPIILEATLHLAEIEDMPLFEPRVFTAGSEERVTCLPPKGLPEPSVWWEHAGVRLPTHGRVYQKGHELVLANIAESDAGVYTCHAANLAGQRRQDVNITVATVPSWLKKPQDSQLEEGKPGYLDCLTQATPKPTVVWYRNQMLISEDSRFEVFKNGTLRINSVEVYDGTWYRCMSSTPAGSIEAQARVQVLEKLKFTPPPQPQQCMEFDKEATVPCSATGREKPTIKWERADGSSLPEWVTDNAGTLHFARVTRDDAGNYTCIASNGPQGQIRAHVQLTVAVFITFKVEPERTTVYQGHTALLQCEAQGDPKPLIQWKGKDRILDPTKLGPRMHIFQNGSLVIHDVAPEDSGRYTCIAGNSCNIKHTEAPLYVVDKPVPEESEGPGSPPPYKMIQTIGLSVGAAVAYIIAVLGLMFYCKKRCKAKRLQKQPEGEEPEMECLNGGPLQNGQPSAEIQEEVALTSLGSGPAATNKRHSTSDKMHFPRSSLQPITTLGKSEFGEVFLAKAQGLEEGVAETLVLVKSLQSKDEQQQLDFRRELEMFGKLNHANVVRLLGLCREAEPHYMVLEYVDLGDLKQFLRISKSKDEKLKSQPLSTKQKVALCTHVALGMEHLSNNRFVHKDLAARNCLVSAQRQVKVSALGLSKDVYNSEYYHFRQAWVPLRWMSPEAILEGDFSTKSDVWAFGVLMWEVFTHGEMPHGGQADDEVLADLQAGKARLPQPEGCPSKLYRLMQRCWALSPKDRPSFSEIASALGDSTVDSKP

SEQ ID NO: 52 - protein, 25 aa, Homo sapiens
MSAIQAAWPSGTECIAKYNFHGTAE

SEQ ID NO: 53 - protein, 919 aa, Homo sapiens
MGPEALSSLLLLLLVASGDADMKGHFDPAKCRYALGMQDRTIPDSDISASSSWSDSTAACHSRLESSDGDGAWCPAGSVFPKEEEYLQVDLQRLHLVALVGTQGRHAGGLGKEFSRSYRLRYSRDGRRWMGWKDRWGQEVISGNEDPEGVVLKDLGPPMVARLVRFYPRADRVMSVCLRVELYGCLWRDGLLSYTAPVGQTMYLSEAVYLNDSTYDGHTVGGLQYGGLGQLADGVVGLDDFRKSQELRVWPGYDYVGWSNHSFSSGYVEMEFEFDRLRAFQAMQVHCNNMHTLGARLPGGVECRFRRGPAMAWEGEPMRHNLGGNLGDPRARAVSVPLGGRVARFLQCRFLFAGPWLLFSEISFISDVVNNSSPALGGTFPPAPWWPPGPPPTNFSSLELEPRGQQPVAKAEGSPTAILIGCLVAIILLLLLIIALMLWRLHWRRLLSKAERRVLEEELTVHLSVPGDTILINNRPGPREPPPYQEPRPRGNPPHSAPCVPNGSALLLSNPAYRLLLATYARPPRGPGPPTPAWAKPTNTQAYSGDYMEPEKPGAPLLPPPPQNSVPHYAEADIVTLQGVTGGNTYAVPALPPGAVGDGPPRVDFPRSRLRFKEKLGEGQFGEVHLCEVDSPQDLVSLDFPLNVRKGHPLLVAVKILRPDATKNASFSLFSRNDFLKEVKIMSRLKDPNIIRLLGVCVQDDPLCMITDYMENGDLNQFLSAHQLEDKAAEGAPGDGQAAQGPTISYPMLLHVAAQIASGMRYLATLNFVHRDLATRNCLVGENFTIKIADFGMSRNLYAGDYYRVQGRAVLPIRWMAWECILMGKFTTASDVWAFGVTLWEVLMLCRAQPFGQLTDEQVIENAGEFFRDQGRQVYLSRPPACPQGLYELMLRCWSRESEQRPPFSQLHRFLAEDALNTV

SEQ ID NO: 54 - protein, 919 aa, Homo sapiens
MGPEALSSLLLLLLVASGDADMKGHFDPAKCRYALGMQDRTIPDSDISASSSWSDSTAARHSRLESSDGDGAWCPAGSVFPKEEEYLQVDLQRLHLVALAGTQGRHAGGLGKEFSRSYRLRYSRDGRRWMGWKDRWGQEVISGNEDPEGVVLKDLGPPMVARLVRFYPRADRVMSVCLRVELYGCLWRDGLLSYTAPVGQTMYLSEAVYLNDSTYDGHTVGGLQYGGLGQLADGVVGLDDFRKSQELRVWPGYDYVGWSNHSFSSGYVEMEFEFDRLRAFQAMQVHCNNMHTLGARLPGGVECRFRRGPAMAWEGEPMRHNLGGNLGDPRARAVSVPLGGRVARFLQCRFLFAGPWLLFSEISFISDVVNNSSPALGGTFPPAPWWPPGPPPTNFSSLELEPRGQQPVAKAEGSPTAILIGCLVAIILLLLLIIALMLWRLHWRRLLSKAERRVLEEELTVHLSVPGDTILINNRPGPREPPPYQEPRPRGNPPHSAPCVPNGSALLLSNPAYRLLLATYARPPRGPGPPTPAWAKPTNTQAYSGDYMEPEKPGAPLLPPPPQNSVPHYAEADIVTLQGVTGGNTYAVPALPPGAVGDGPPRVDFPRSRLRFKEKLGEGQFGEVHLCEVDSPQDLVSLDFPLNVRKGHPLLVAVKILRPDATKNASFSLFSRNDFLKEVKIMSRLKDPNIIRLLGVCVQDDPLCMITDYMENGDLNQFLSAHQLEDKAAEGAPGDGQAAQGPTISYPMLLHVAAQIASGMRYLATLNFVHRDLATRNCLVGENFTIKIADFGMSRNLYAGDYYRVQGRAVLPIRWMAWECILMGKFTTASDVWAFGVTLWEVLMLCRAQPFGQLTDEQVIENAGEFFRDQGRQVYLSRPPACPQGLYELMLRCWSRESEQRPPFSQLHRFLAEDALNTV

SEQ ID NO: 55 - protein, 919 aa, Homo sapiens
MGPEALSSLLLLLLVASGDADMKGHFDPAKCRYALGMQDRTIPDSDISASSSWSDSTAARHSRLESSDGDGAWCPAGSVFPKEEEYLQVDLQRLHLVALVGTQGRHAGGLGKEFSRSYRLRYSRDGRRWMGWKDRWGQEVISGNEDPEGVVLKDLGPPMVARLVRFYPRADRVMSVCLRVELYGCLWRDGLLSYTAPVGQTMYLSEAVYLNDSTYDGHTVGGLQYGGLGQLADGVVGLDDFRKSQELWVWPGYDYVGWSNHSFSSGYVEMEFEFDRLRAFQAMQVHCNNMHTLGARLPGGVECRFRRGPAMAWEGEPMRHNLGGNLGDPRARAVSVPLGGRVARFLQCRFLFAGPWLLFSEISFISDVVNNSSPALGGTFPPAPWWPPGPPPTNFSSLELEPRGQQPVAKAEGSPTAILIGCLVAIILLLLLIIALMLWRLHWRRLLSKAERRVLEEELTVHLSVPGDTILINNRPGPREPPPYQEPRPRGNPPHSAPCVPNGSALLLSNPAYRLLLATYARPPRGPGPPTPAWAKPTNTQAYSGDYMEPEKPGAPLLPPPPQNSVPHYAEADIVTLQGVTGGNTYAVPALPPGAVGDGPPRVDFPRSRLRFKEKLGEGQFGEVHLCEVDSPQDLVSLDFPLNVRKGHPLLVAVKILRPDATKNASFSLFSRNDFLKEVKIMSRLKDPNIIRLLGVCVQDDPLCMITDYMENGDLNQFLSAHQLEDKAAEGAPGDGQAAQGPTISYPMLLHVAAQIASGMRYLATLNFVHRDLATRNCLVGENFTIKIADFGMSRNLYAGDYYRVQGRAVLPIRWMAWECILMGKFTTASDVWAFGVTLWEVLMLCRAQPFGQLTDEQVIENAGEFFRDQGRQVYLSRPPACPQGLYELMLRCWSRESEQRPPFSQLHRFLAEDALNTV

SEQ ID NO: 56 - protein, 855 aa, Homo sapiens
MILIPRMLLVLFLLLPILSSAKAQVNPAICRYPLGMSGGQIPDEDITASSQWSESTAAKYGRLDSEEGDGAWCPEIPVEPDDLKEFLQIDLHTLHFITLVGTQGRHAGGHGIEFAPIYKINYSRDGTRWISWRNRHGKQVLDGNSNPYDIFLKDLEPPIVARFVRFIPVTDHSMNVCMRVELYGCVWLDGLVSYNAPAGQQFVLPGGSIIYLNDSVYDGAVGYSMTEGLGQLTDGVSGLDDFTQTHEYHVWPGYDYVGWRNESATNGYIEIMFEFDRIRNFTTMKVHCNNMFAKGVKIFKEVQCYFRSEASEWEPNAISFPLVLDDVNPSARFVTVPLHHRMASAIKCQYHFADTWMMFSEITFQSDAAMYNNSEALPTSPMAPTTYDPMLKVDDSNTRILIGCLVAIIFILLAIIVIILWRQFWQKMLEKASRRMLDDEMTVSLSLPSDSSMFNNNRSSSPSEQGSNSTYDRIFPLRPDYQEPSRLIRKLPEFAPGEEESGCSGVVKPVQPSGPEGVPHYAEADIVNLQGVTGGNTYSVPAVTMDLLSGKDVAVEEFPRKLLTFKEKLGEGQFGEVHLCEVEGMEKFKDKDFALDVSANQPVLVAVKMLRADANKNARNDFLKEIKIMSRLKDPNIIHLLAVCITDDPLCMITEYMENGDLNQFLSRHEPPNSSSSDVRTVSYTNLKFMATQIASGMKYLSSLNFVHRDLATRNCLVGKNYTIKIADFGMSRNLYSGDYYRIQGRAVLPIRWMSWESILLGKFTTASDVWAFGVTLWETFTFCQEQPYSQLSDEQVIENTGEFFRDQGRQTYLPQPAICPDSVYKLMLSCWRRDTKNRPSFQEIHLLLLQQGDE

SEQ ID NO: 57 - protein, 855 aa, Homo sapiens
MILIPRMLLVLFLLLPILSSAKAQVNPAICRYPLGMSGGQIPDEDITASSQWSESTAAKYGRLDSEEGDGAWCPEIPVEPDDLKEFLQIDLHTLHFITLVGTQGRHAGGHGIEFAPMYKINYSRDGTRWISWRNRHGKQVLDGNSNPYDIFLKDLEPPIVARFVRFIPVTDHSMNVCMRVELYGCVWLDGLVSYNAPAGQQFVLPGGSIIYLNDSVYDGAVGYSMTEGLGQLTDGVSGLDDFTQTHEYHVWPGYDYVGWRNESATNGYIEIMFEFDRIRNFTTMKVHCNNMFAKGVKIFKEVQCYFRSEASEWEPNAISFPLVLDDVNPSARFVTVPLHHRMASAIKCQYHFADTWMMFSEITFQSDAAMYNNSEALPTSPMAPTTYDPMLKVDDSNTRILIGCLVAIIFILLAIIVIILWRQFWQKMLEKASRRMLDDEMTVSLSLPSDSSMFNNNRSSSPSEQGSNSTYDRIFPLCPDYQEPSRLIRKLPEFAPGEEESGCSGVVKPVQPSGPEGVPHYAEADIVNLQGVTGGNTYSVPAVTMDLLSGKDVAVEEFPRKLLTFKEKLGEGQFGEVHLCEVEGMEKFKDKDFALDVSANQPVLVAVKMLRADANKNARNDFLKEIKIMSRLKDPNIIHLLAVCITDDPLCMITEYMENGDLNQFLSRHEPPNSSSSDVRTVSYTNLKFMATQIASGMKYLSSLNFVHRDLATRNCLVGKNYTIKIADFGMSRNLYSGDYYRIQGRAVLPIRWMSWESILLGKFTTASDVWAFGVTLWETFTFCQEQPYSQLSDEQVIENTGEFFRDQGRQTYLPQPAICPDSVYKLMLSCWRRDTKNRPSFQEIHLLLLQQGDE

SEQ ID NO: 58 - protein, 1210 aa, Homo sapiens
MRPSGTAGAALLALLAALCPASRALEEKKVCQGTSNKLTQLGTFEDHFLSLQRMFNNCEVVLGNLEITYVQRNYDLSFLKTIQEVAGYVLIALNTVERIPLENLQIIRGNMYYEKSYALAVLSNYDANKTGLKELPMRNLQEILHGAVRFSNNPALCNVESIQWRDIVSSDFLSNMSMDFQNHLGSCQKCDPSCPNGSCWGAGEENCQKLTKIICAQQCSGRCRGKSPSDCCHNQCAAGCTGPRESDCLVCRKFRDEATCKDTCPPLMLYNPTTYQMDVNPEGKYSFGATCVKKCPRNYVVTDHGSCVRACGADSYEMEEDGVRKCKKCEGPCRKVCNGIGIGEFKDSLSINATNIKHFKNCTSISGDLHILPVAFRGDSFTHTPPLDPQELDILKTVKEITGFLLIQAWPENRTDLHAFENLEIIRGRTKQHGQFSLAVVSLNITSLGLRSLKEISDGDVIISGNKNLCYANTINWKKLFGTSGQKTKIISNRGENSCKATGQVCHALCSPEGCWGPEPRDCVSCRNVSRGRECVDKCNLLEGEPREFVENSECIQCHPECLPQAMNITCTGRGPDNCIQCAHYIDGPHCVKTCPAGVMGENNTLVWKYADAGHVCHLCHPNCTYGCTGPGLEGCPTNGPKIPSIATGMVGALLLLLVVALGIGLFMRRRHIVRKRTLRRLLQERELVEPLTPSGEAPNQALLRILKETEFKKIKVLGSGAFGTVYKGLWIPEGEKVKIPVAIKELREATSPKANKEILDEAYVMASVDNPHVCRLLGICLTSTVQLITQLMPFGCLLDYVREHKDNIGSQYLLNWCVQIAKGMNYLEDRRLVHRDLAARNVLVKTPQHVKITDFGLAKLLGAEEKEYHAEGGKVPIKWMALESILHRIYTHQSDVWSYGVTVWELMTFGSKPYDGIPASEISSILEKGERLPQPPICTIDVYMIMVKCWMIDADSRPKFRELIIEFSKMARDPQRYLVIQGDERMHLPSPTDSNFYRALMDEEDMDDVVDADEYLIPQQGFFSSPSTSRTPLLSSLSATSNNSTVACIDRNGLQSCPIKEDSFLQRYSSDPTGALTEDSIDDTFLPVPEYINQSVPKRPAGSVQNPVYHNQPLNPAPSRDPHYQDPHSTAVGNPEYLNTVQPTCVNSTFDSPAHWAQKGSHQISLDNPDYQQDFFPKEAKPNGIFKGSTAENAEYLRVAPQSSEFIGA

SEQ ID NO: 59 - protein, 1210 aa, Homo sapiens
MRPSGTAGAALLALLAALCPASRALEEKKVCQGTSNKLTQLGTFEDHFLSLQRMFNNCEVVLGNLEITYVQRNYDLSFLKTIQEVAGYVLIALNTVERIPLENLQIIRGNMYYENSYALAVLSNYDANKTGLKELPMRNLQEILHGAVRFSNNPALCNVESIQWRDIVSSDFLSNMSMDFQNHLGSCQKCDPSCPNGSCWGAGEENCQKLTKIICAQQCSGRCRGKSPSDCCHNQCAAGCTGPRESDCLVCRKFRDEATCKDTCPPLMLYNPTTYQMDVNPEGKYSFGVTCVKKCPRNYVVTDHGSCVRACGADSYEMEEDGVRKCKKCEGPCRKVCNGIGIGEFKDSLSINATNIKHFKNCTSISGDLHILPVAFRGDSFTHTPPLDPQELDILKTVKEITGFLLIQAWPENRTDLHAFENLEIIRGRTKQHGQFSLAVVSLNITSLGLRSLKEISDGDVIISGNKNLCYANTINWKKLFGTSGQKTKIISNRGENSCKATGQVCHALCSPEGCWGPEPRDCVSCRNVSRGRECVDKCNLLEGEPREFVENSECIQCHPECLPQAMNITCTGRGPDNCIQCAHYIDGPHCVKTCPAGVMGENNTLVWKYADAGHVCHLCHPNCTYGCTGPGLEGCPTNGPKIPSIATGMVGALLLLLVVALGIGLFMRRRHIVRKRTLRRLLQERELVEPLTPSGEAPNQALLRILKETEFKKIKVLGSGAFGTVYKGLWIPEGEKVKIPVAIKELREATSPKANKEILDEAYVMASVDNPHVCRLLGICLTSTVQLITQLMPFGCLLDYVREHKDNIGSQYLLNWCVQIAKGMNYLEDRRLVHRDLAARNVLVKTPQHVKITDFGLAKLLGAEEKEYHAEGGKVPIKWMALESILHRIYTHQSDVWSYGVTVWELMTFGSKPYDGIPASEISSILEKGERLPQPPICTIDVYMIMVKCWMIDADSRPKFRELIIEFSKMARDPQRYLVIQGDERMHLPSPTDSNFYRALMDEEDMDDVVDADEYLIPQQGFFSSPSTSRTPLLSSLSATSNNSTVACIDRNGLQSCPIKEDSFLQRYSSDPTGALTEDSIDDTFLPVPEYINQSVPKRPAGSVQNPVYHNQPLNPAPSRDPHYQDPHSTAVGNPEYLNTVQPTCVNSTFDSPAHWAQKGSHQISLDNPDYQQDFFPKEAKPNGIFKGSTAENAEYLRVAPQSSEFIGA

SEQ ID NO: 60 - protein, 1210 aa, Homo sapiens
MRPSGTAGAALLALLAALCPASRALEEKKVCQGTSNKLTQLGTFEDHFLSLQRMFNNCEVVLGNLEITYVQRNYDLSFLKTIQEVAGYVLIALNTVERIPLENLQIIRGNMYYENSYALAVLSNYDANKTGLKELPMRNLQEILHGAVRFSNNPALCNVESIQWRDIVSSDFLSNMSMDFQNHLGSCQKCDPSCPNGSCWGAGEENCQKLTKIICAQQCSGRCRGKSPSDCCHNQCAAGCTGPRESDCLVCRKFRDEATCKDTCPPLMLYNPTTYQMDVNPEGKYSFGATCVKKCPRNYVVTDHGSCVRACGADSYEMEEDGVRKCKKCEGSCRKVCNGIGIGEFKDSLSINATNIKHFKNCTSISGDLHILPVAFRGDSFTHTPPLDPQELDILKTVKEITGFLLIQAWPENRTDLHAFENLEIIRGRTKQHGQFSLAVVSLNITSLGLRSLKEISDGDVIISGNKNLCYANTINWKKLFGTSGQKTKIISNRGENSCKATGQVCHALCSPEGCWGPEPRDCVSCRNVSRGRECVDKCNLLEGEPREFVENSECIQCHPECLPQAMNITCTGRGPDNCIQCAHYIDGPHCVKTCPAGVMGENNTLVWKYADAGHVCHLCHPNCTYGCTGPGLEGCPTNGPKIPSIATGMVGALLLLLVVALGIGLFMRRRHIVRKRTLRRLLQERELVEPLTPSGEAPNQALLRILKETEFKKIKVLGSGAFGTVYKGLWIPEGEKVKIPVAIKELREATSPKANKEILDEAYVMASVDNPHVCRLLGICLTSTVQLITQLMPFGCLLDYVREHKDNIGSQYLLNWCVQIAKGMNYLEDRRLVHRDLAARNVLVKTPQHVKITDFGLAKLLGAEEKEYHAEGGKVPIKWMALESILHRIYTHQSDVWSYGVTVWELMTFGSKPYDGIPASEISSILEKGERLPQPPICTIDVYMIMVKCWMIDADSRPKFRELIIEFSKMARDPQRYLVIQGDERMHLPSPTDSNFYRALMDEEDMDDVVDADEYLIPQQGFFSSPSTSRTPLLSSLSATSNNSTVACIDRNGLQSCPIKEDSFLQRYSSDPTGALTEDSIDDTFLPVPEYINQSVPKRPAGSVQNPVYHNQPLNPAPSRDPHYQDPHSTAVGNPEYLNTVQPTCVNSTFDSPAHWAQKGSHQISLDNPDYQQDFFPKEAKPNGIFKGSTAENAEYLRVAPQSSEFIGA

SEQ ID NO: 61 - protein, 1210 aa, Homo sapiens [sequence omitted]

SEQ ID NO: 62 - protein, 1210 aa, Homo sapiens
MRPSGTAGAALLALLAALCPASRALEEKKVCQGTSNKLTQLGTFEDHFLSLQRMFNNCEVVLGNLEITYVQRNYDLSFLKTIQEVAGYVLIALNTVERIPLENLQIIRGNMYYENSYALAVLSNYDANKTGLKELPMRNLQEILHGAVRFSNNPALCNVESIQWRDIVSSDFLSNMSMDFQNHLGSCQKCDPSCPNGSCWGAGEENCQKLTKIICAQQCSGRCRGKSPSDCCHNQCAAGCTGPRESDCLVCRKFRDEATCKDTCPPLMLYNPTTYQMDVNPEGKYSFGATCVKKCPRNYVVTDHGSCVRACGADSYEMEEDGVRKCKKCEGPCRKVCNGIGIGEFKDSLSINATNIKHFKNCTSISGDLHILPVAFRGDSFTHTPPLDPQELDILKTVKEITGFLLIQAWPENRTDLHAFENLEIIRGRTKQHGQFSLAVVSLNITSLGLRSLKEISDGDVIISGNKNLCYANTINWKKLFGTSGQKTKIISNRGENSCKATGQVCHALCSPEGCWGPEPRDCVSCRNVSRGRECVDKCNLLEGEPREFVENSECIQCHPECLPQAMNITCTGRGPDNCIQCAHYIDGPHCVKTCPAGVMGENNTLVWKYADAGHVCHLCHPNCTYGCTGPGLEGCPTNGPKIPSIATGMVGALLLLLVVALGIGLFMRRRHIVRKRMLRRLLQERELVEPLTPSGEAPNQALLRILKETEFKKIKVLGSGAFGTVYKGLWIPEGEKVKIPVAIKELREATSPKANKEILDEAYVMASVDNPHVCRLLGICLTSTVQLITQLMPFGCLLDYVREHKDNIGSQYLLNWCVQIAKGMNYLEDRRLVHRDLAARNVLVKTPQHVKITDFGLAKLLGAEEKEYHAEGGKVPIKWMALESILHRIYTHQSDVWSYGVTVWELMTFGSKPYDGIPASEISSILEKGERLPQPPICTIDVYMIMVKCWMIDADSRPKFRELIIEFSKMARDPQRYLVIQGDERMHLPSPTDSNFYRALMDEEDMDDVVDADEYLIPQQGFFSSPSTSRTPLLSSLSATSNNSTVACIDRNGLQSCPIKEDSFLQRYSSDPTGALTEDSIDDTFLPVPEYINQSVPKRPAGSVQNPVYHNQPLNPAPSRDPHYQDPHSTAVGNPEYLNTVQPTCVNSTFDSPAHWAQKGSHQISLDNPDYQQDFFPKEAKPNGIFKGSTAENAEYLRVAPQSSEFIGA

SEQ ID NO: 63 - protein, 1210 aa, Homo sapiens
MRPSGTAGAALLALLAALCPASRALEEKKVCQGTSNKLTQLGTFEDHFLSLQRMFNNCEVVLGNLEITYVQRNYDLSFLKTIQEVAGYVLIALNTVERIPLENLQIIRGNMYYENSYALAVLSNYDANKTGLKELPMRNLQEILHGAVRFSNNPALCNVESIQWRDIVSSDFLSNMSMDFQNHLGSCQKCDPSCPNGSCWGAGEENCQKLTKIICAQQCSGRCRGKSPSDCCHNQCAAGCTGPRESDCLVCRKFRDEATCKDTCPPLMLYNPTTYQMDVNPEGKYSFGATCVKKCPRNYVVTDHGSCVRACGADSYEMEEDGVRKCKKCEGPCRKVCNGIGIGEFKDSLSINATNIKHFKNCTSISGDLHILPVAFRGDSFTHTPPLDPQELDILKTVKEITGFLLIQAWPENRTDLHAFENLEIIRGRTKQHGQFSLAVVSLNITSLGLRSLKEISDGDVIISGNKNLCYANTINWKKLFGTSGQKTKIISNRGENSCKATGQVCHALCSPEGCWGPEPRDCVSCRNVSRGRECVDKCNLLEGEPREFVENSECIQCHPECLPQAMNITCTGRGPDNCIQCAHYIDGPHCVKTCPAGVMGENNTLVWKYADAGHVCHLCHPNCTYGCTGPGLEGCPTNGPKIPSIATGMVGALLLLLVVALGIGLFMRRRHIVRKRTLRRLLQERELVEPLTPSGEAPNQALLRILKETEFKKIKVLGSGAFGTVYKGLWIPEGEKVKIPVAIKELREATSSKANKEILDEAYVMASVDNPHVCRLLGICLTSTVQLITQLMPFGCLLDYVREHKDNIGSQYLLNWCVQIAKGMNYLEDRRLVHRDLAARNVLVKTPQHVKITDFGLAKLLGAEEKEYHAEGGKVPIKWMALESILHRIYTHQSDVWSYGVTVWELMTFGSKPYDGIPASEISSILEKGERLPQPPICTIDVYMIMVKCWMIDADSRPKFRELIIEFSKMARDPQRYLVIQGDERMHLPSPTDSNFYRALMDEEDMDDVVDADEYLIPQQGFFSSPSTSRTPLLSSLSATSNNSTVACIDRNGLQSCPIKEDSFLQRYSSDPTGALTEDSIDDTFLPVPEYINQSVPKRPAGSVQNPVYHNQPLNPAPSRDPHYQDPHSTAVGNPEYLNTVQPTCVNSTFDSPAHWAQKGSHQISLDNPDYQQDFFPKEAKPNGIFKGSTAENAEYLRVAPQSSEFIGA

SEQ ID NO: 64 - protein, 1210 aa, Homo sapiens
MRPSGTAGAALLALLAALCPASRALEEKKVCQGTSNKLTQLGTFEDHFLSLQRMFNNCEVVLGNLEITYVQRNYDLSFLKTIQEVAGYVLIALNTVERIPLENLQIIRGNMYYENSYALAVLSNYDANKTGLKELPMRNLQEILHGAVRFSNNPALCNVESIQWRDIVSSDFLSNMSMDFQNHLGSCQKCDPSCPNGSCWGAGEENCQKLTKIICAQQCSGRCRGKSPSDCCHNQCAAGCTGPRESDCLVCRKFRDEATCKDTCPPLMLYNPTTYQMDVNPEGKYSFGATCVKKCPRNYVVTDHGSCVRACGADSYEMEEDGVRKCKKCEGPCRKVCNGIGIGEFKDSLSINATNIKHFKNCTSISGDLHILPVAFRGDSFTHTPPLDPQELDILKTVKEITGFLLIQAWPENRTDLHAFENLEIIRGRTKQHGQFSLAVVSLNITSLGLRSLKEISDGDVIISGNKNLCYANTINWKKLFGTSGQKTKIISNRGENSCKATGQVCHALCSPEGCWGPEPRDCVSCRNVSRGRECVDKCNLLEGEPREFVENSECIQCHPECLPQAMNITCTGRGPDNCIQCAHYIDGPHCVKTCPAGVMGENNTLVWKYADAGHVCHLCHPNCTYGCTGPGLEGCPTNGPKIPSIATGMVGALLLLLVVALGIGLFMRRRHIVRKRTLRRLLQERELVEPLTPSGEAPNQALLRILKETEFKKIKVLGSGAFGTVYKGLWIPEGEKVKIPVAIKELREATSPKANKEILDEAYVMASVDNPHVCRLLGICLTSTVQLITQLMPFGCLLDYVREHKDNIGSQYLLNWCVQIAKGMNYLEDRRLVHRDLAARNVLVKTPQHVKITDFGLAKLLGAEEKEYHAEGGKVPIKWMALESILHRIYTHQSDVWSYGVTVWELMTFGSKPYDGIPASKISSILEKGERLPQPPICTIDVYMIMVKCWMIDADSRPKFRELIIEFSKMARDPQRYLVIQGDERMHLPSPTDSNFYRALMDEEDMDDVVDADEYLIPQQGFFSSPSTSRTPLLSSLSATSNNSTVACIDRNGLQSCPIKEDSFLQRYSSDPTGALTEDSIDDTFLPVPEYINQSVPKRPAGSVQNPVYHNQPLNPAPSRDPHYQDPHSTAVGNPEYLNTVQPTCVNSTFDSPAHWAQKGSHQISLDNPDYQQDFFPKEAKPNGIFKGSTAENAEYLRVAPQSSEFIGA

SEQ ID NO: 65 - protein, 1210 aa, Homo sapiens
MRPSGTAGAALLALLAALCPASRALEEKKVCQGTSNKLTQLGTFEDHFLSLQRMFNNCEVVLGNLEITYVQRNYDLSFLKTIQEVAGYVLIALNTVERIPLENLQIIRGNMYYENSYALAVLSNYDANKTGLKELPMRNLQEILHGAVRFSNNPALCNVESIQWRDIVSSDFLSNMSMDFQNHLGSCQKCDPSCPNGSCWGAGEENCQKLTKIICAQQCSGRCRGKSPSDCCHNQCAAGCTGPRESDCLVCRKFRDEATCKDTCPPLMLYNPTTYQMDVNPEGKYSFGATCVKKCPRNYVVTDHGSCVRACGADSYEMEEDGVRKCKKCEGPCRKVCNGIGIGEFKDSLSINATNIKHFKNCTSISGDLHILPVAFRGDSFTHTPPLDPQELDILKTVKEITGFLLIQAWPENRTDLHAFENLEIIRGRTKQHGQFSLAVVSLNITSLGLRSLKEISDGDVIISGNKNLCYANTINWKKLFGTSGQKTKIISNRGENSCKATGQVCHALCSPEGCWGPEPRDCVSCRNVSRGRECVDKCNLLEGEPREFVENSECIQCHPECLPQAMNITCTGRGPDNCIQCAHYIDGPHCVKTCPAGVMGENNTLVWKYADAGHVCHLCHPNCTYGCTGPGLEGCPTNGPKIPSIATGMVGALLLLLVVALGIGLFMRRRHIVRKRTLRRLLQERELVEPLTPSGEAPNQALLRILKETEFKKIKVLGSGAFGTVYKGLWIPEGEKVKIPVAIKELREATSPKANKEILDEAYVMASVDNPHVCRLLGICLTSTVQLITQLMPFGCLLDYVREHKDNIGSQYLLNWCVQIAKGMNYLEDRRLVHRDLAARNVLVKTPQHVKITDFGLAKLLGAEEKEYHAEGGKVPIKWMALESILHRIYTHQSDVWSYGVTVWELMTFGSKPYDGIPASEISSILEKGERLPQPPICTIDVYMIMVKCWMIDADSRPKFRELIIEFSKMARDPQRYLVIQGDERMHLPSPTDSNFYRALMDEEDMDDVVDADEYLIPQQGFFSSPSTSRTPLLSSLSATSNNSTVACIDRNGLQSCPIKEDSFLQRYSSDPTGALTEDSIDDTFLPVPEYINQSVPKRPAGSVQNPVYHNQPLNPTPSRDPHYQDPHSTAVGNPEYLNTVQPTCVNSTFDSPAHWAQKGSHQISLDNPDYQQDFFPKEAKPNGIFKGSTAENAEYLRVAPQSSEFIGA

SEQ ID NO: 66 - protein, 976 aa, Homo sapiens
MELQAARACFALLWGCALAAAAAAQGKEVVLLDFAAAGGELGWLTHPYGKGWDLMQNIMNDMPIYMYSVCNVMSGDQDNWLRTNWVYRGEAERIFIELKFTVRDCNSFPGGASSCKETFNLYYAESDLDYGTNFQKRLFTKIDTIAPDEITVSSDFEARHVKLNVEERSVGPLTRKGFYLAFQDIGACVALLSVRVYYKKCPELLQGLAHFPETIAGSDAPSLATVAGTCVDHAVVPPGGEEPRMHCAVDGEWLVPIGQCLCQAGYEKVEDACQACSPGFFKFEASESPCLECPEHTLPSPEGATSCECEEGFFQAPQDPASMPCTRPPSAPHYLTAVGMGAKVELRWTPPQDSGGREDIVYSVTCEQCWPESGECGPCEASVRYSEPPHGLTRTSVTVSDLEPHMNYTFTVEARNGVSGLVTSRSFRTASVSINQTEPPKVRLEGRSTTSLSVSWSIPPPQQSRVWKYEVTYRKKGDSNSYNVRRTEGFSVTLDDLAPDTTYLVQVQALTQEGQGAGSKVHEFQTLSPEGSGNLAVIGGVAVGVVLLLVLAGVGFFIHRRRKNQRARQSPEDVYFSKSEQLKPLKTYVDPHTYEDPNQAVLKFTTEIHPSCVTRQKVIGAGEFGEVYKGMLKTSSGKKEVPVAIKTLKAGYTEKQRVDFLGEAGIMGQFSHHNIIRLEGVISKYKPMMIITEYMENGALDKFLREKDGEFSVLQLVGMLRGIAAGMKYLANMNYVHRDLAARNILVNSNLVCKVSDFGLSRVLEDDPEATYTTSGGKIPIRWTAPEAISYRKFTSASDVWSFGIVMWEVMTYGERPYWELSNHEVMKAINDGFRLPTPMDCPSAIYQLMMQCWQQERARRPKFADIVSILDKLIRAPDSLKTLADFDPRVSIRLPSTSGSEGVPFRTVSEWLESIKMQQYTEHFMAAGYTAIEKVVQMTNDDIKRIGVRLPGHQKRIAYSLLGLKDQVNTVGIPI

SEQ ID NO: 67 - protein, 976 aa, Homo sapiens
MELQAARACFALLWGCALAAAAAAQGKEVVLLDFAAAGGELGWLTHPYGKGWDLMQNIMNDMPIYMYSVCNVMSGDQDNWLRTNWVYRGEAERIFIELKFTVRDCNSFPGGASSCKETFNLYYAESDLDYGTNFQKRLFTKIDTIAPDEITVSSDFEARHVKLNVEERSVGPLTRKGFYLAFQDIGACVALLSVRVYYKKCPELLQGLAHFPETIAGSDAPSLATVAGTCVDHAVVPPGGEEPRMHCAVDGEWLVPIGQCLCQAGYEKVEDACQACSPGFFKFEASESPCLECPEHTLPSPEGATSCECEEGFFRAPQDPASMPCTRPPSAPRYLTAVGMGAKVELRWTPPQDSGGREDIVYSVTCEQCWPESGECGPCEASVRYSEPPHGLTRTSVTVSDLEPHMNYTFTVEARNGVSGLVTSRSFRTASVSINQTEPPKVRLEGRSTTSLSVSWSIPPPQQSRVWKYEVTYRKKGDSNSYNVRRTEGFSVTLDDLAPDTTYLVQVQALTQEGQGAGSKVHEFQTLSPEGSGNLAVIGGVAVGVVLLLVLAGVGFFIHRRRKNQRARQSPEDVYFSKSEQLKPLKTYVDPHTYEDPNQAVLKFTTEIHPSCVTRQKVIGAGEFGEVYKGMLKTSSGKKEVPVAIKTLKAGYTEKQRVDFLGEAGIMGQFSHHNIIRLEGVISKYKPMMIITEYMENGALDKFLREKDGEFSVLQLVGMLRGIAAGMKYLANMNYVHRDLAARNILVNSNLVCKVSDFGLSRVLEDDPEATYTTSGGKIPIRWTAPEAISYRKFTSASDVWSFGIVMWEVMTYGERPYWELSNHEVMKAINDGFRLPTPMDCPSAIYQLMMQCWQQERARRPKFADIVSILDKLIRAPDSLKTLADFDPRVSIRLPSTSGSEGVPFRTVSEWLESIKMQQYTEHFMAAGYTAIEKVVQMTNDDIKRIGVRLPGHQKRIAYSLLGLKDQVNTVGIPI

SEQ ID NO: 68 - protein, 976 aa, Homo sapiens [sequence omitted]

SEQ ID NO: 69 - protein, 976 aa, Homo sapiens
MELQAARACFALLWGCALAAAAAAQGKEVVLLDFAAAGGELGWLTHPYGKGWDLMQNIMNDMPIYMYSVCNVMSGDQDNWLRTNWVYRGEAERIFIELKFTVRDCNSFPGGASSCKETFNLYYAESDLDYGTNFQKRLFTKIDTIAPDEITVSSDFEARHVKLNVEERSVGPLTRKGFYLAFQDIGACVALLSVRVYYKKCPELLQGLAHFPETIAGSDAPSLATVAGTCVDHAVVPPGGEEPRMHCAVDGEWLVPIGQCLCQAGYEKVEDACQACSPGFFKFEASESPCLECPEHTLPSPEGATSCECEEGFFRAPQDPASMPCTRPPSAPHYLTAVGMGAKVELRWTPPQDSGGREDIVYSVTCEQCWPESGECGPCEASVRYSEPPHGLTRTSVTVSDLEPHMNYTFTVEARNGVSGLVTSRSFRTASVSINQTEPPKVRLEGRSTTSLSVSWSIPLPQQSRVWKYEVTYRKKGDSNSYNVRRTEGFSVTLDDLAPDTTYLVQVQALTQEGQGAGSKVHEFQTLSPEGSGNLAVIGGVAVGVVLLLVLAGVGFFIHRRRKNQRARQSPEDVYFSKSEQLKPLKTYVDPHTYEDPNQAVLKFTTEIHPSCVTRQKVIGAGEFGEVYKGMLKTSSGKKEVPVAIKTLKAGYTEKQRVDFLGEAGIMGQFSHHNIIRLEGVISKYKPMMIITEYMENGALDKFLREKDGEFSVLQLVGMLRGIAAGMKYLANMNYVHRDLAARNILVNSNLVCKVSDFGLSRVLEDDPEATYTTSGGKIPIRWTAPEAISYRKFTSASDVWSFGIVMWEVMTYGERPYWELSNHEVMKAINDGFRLPTPMDCPSAIYQLMMQCWQQERARRPKFADIVSILDKLIRAPDSLKTLADFDPRVSIRLPSTSGSEGVPFRTVSEWLESIKMQQYTEHFMAAGYTAIEKVVQMTNDDIKRIGVRLPGHQKRIAYSLLGLKDQVNTVGIPI

SEQ ID NO: 70 - protein, 976 aa, Homo sapiens
MELQAARACFALLWGCALAAAAAAQGKEVVLLDFAAAGGELGWLTHPYGKGWDLMQNIMNDMPIYMYSVCNVMSGDQDNWLRTNWVYRGEAERIFIELKFTVRDCNSFPGGASSCKETFNLYYAESDLDYGTNFQKRLFTKIDTIAPDEITVSSDFEARHVKLNVEERSVGPLTRKGFYLAFQDIGACVALLSVRVYYKKCPELLQGLAHFPETIAGSDAPSLATVAGTCVDHAVVPPGGEEPRMHCAVDGEWLVPIGQCLCQAGYEKVEDACQACSPGFFKFEASESPCLECPEHTLPSPEGATSCECEEGFFRAPQDPASMPCTRPPSAPHYLTAVGMGAKVELRWTPPQDSGGREDIVYSVTCEQCWPESGECGPCEASVRYSEPPHGLTRTSVTVSDLEPHMNYTFTVEARNGVSGLVTSRSFRTASVSINQTEPPKVRLEGRSTTSLSVSWSIPPPQQSRVWKYEVTYRKKGDSNSYNVRRTEGFSVTLDDLAPDTTYLVQVQALTQEGQGAGSKVHEFQTLSPEGSGNLAVIGGVAVGVVLLLVLAGVGFFIHRRRKNQRARQSPEDVYFSKSEQLKPLKTYVDPHTYEDPNQAVLKFTTEIYPSCVTRQKVIGAGEFGEVYKGMLKTSSGKKEVPVAIKTLKAGYTEKQRVDFLGEAGIMGQFSHHNIIRLEGVISKYKPMMIITEYMENGALDKFLREKDGEFSVLQLVGMLRGIAAGMKYLANMNYVHRDLAARNILVNSNLVCKVSDFGLSRVLEDDPEATYTTSGGKIPIRWTAPEAISYRKFTSASDVWSFGIVMWEVMTYGERPYWELSNHEVMKAINDGFRLPTPMDCPSAIYQLMMQCWQQERARRPKFADIVSILDKLIRAPDSLKTLADFDPRVSIRLPSTSGSEGVPFRTVSEWLESIKMQQYTEHFMAAGYTAIEKVVQMTNDDIKRIGVRLPGHQKRIAYSLLGLKDQVNTVGIPI

SEQ ID NO: 71 - protein, 976 aa, Homo sapiens
MELQAARACFALLWGCALAAAAAAQGKEVVLLDFAAAGGELGWLTHPYGKGWDLMQNIMNDMPIYMYSVCNVMSGDQDNWLRTNWVYRGEAERIFIELKFTVRDCNSFPGGASSCKETFNLYYAESDLDYGTNFQKRLFTKIDTIAPDEITVSSDFEARHVKLNVEERSVGPLTRKGFYLAFQDIGACVALLSVRVYYKKCPELLQGLAHFPETIAGSDAPSLATVAGTCVDHAVVPPGGEEPRMHCAVDGEWLVPIGQCLCQAGYEKVEDACQACSPGFFKFEASESPCLECPEHTLPSPEGATSCECEEGFFRAPQDPASMPCTRPPSAPHYLTAVGMGAKVELRWTPPQDSGGREDIVYSVTCEQCWPESGECGPCEASVRYSEPPHGLTRTSVTVSDLEPHMNYTFTVEARNGVSGLVTSRSFRTASVSINQTEPPKVRLEGRSTTSLSVSWSIPPPQQSRVWKYEVTYRKKGDSNSYNVRRTEGFSVTLDDLAPDTTYLVQVQALTQEGQGAGSKVHEFQTLSPEGSGNLAVIGGVAVGVVLLLVLAGVGFFIHRRRKNQRARQSPEDVYFSKSEQLKPLKTYVDPHTYEDPNQAVLKFTTEIHPSCVTRQKVIGAGEFGEVYKGTLKTSSGKKEVPVAIKTLKAGYTEKQRVDFLGEAGIMGQFSHHNIIRLEGVISKYKPMMIITEYMENGALDKFLREKDGEFSVLQLVGMLRGIAAGMKYLANMNYVHRDLAARNILVNSNLVCKVSDFGLSRVLEDDPEATYTTSGGKIPIRWTAPEAISYRKFTSASDVWSFGIVMWEVMTYGERPYWELSNHEVMKAINDGFRLPTPMDCPSAIYQLMMQCWQQERARRPKFADIVSILDKLIRAPDSLKTLADFDPRVSIRLPSTSGSEGVPFRTVSEWLESIKMQQYTEHFMAAGYTAIEKVVQMTNDDIKRIGVRLPGHQKRIAYSLLGLKDQVNTVGIPI

SEQ ID NO: 72 - protein, 976 aa, Homo sapiens
MELQAARACFALLWGCALAAAAAAQGKEVVLLDFAAAGGELGWLTHPYGKGWDLMQNIMNDMPIYMYSVCNVMSGDQDNWLRTNWVYRGEAERIFIELKFTVRDCNSFPGGASSCKETFNLYYAESDLDYGTNFQKRLFTKIDTIAPDEITVSSDFEARHVKLNVEERSVGPLTRKGFYLAFQDIGACVALLSVRVYYKKCPELLQGLAHFPETIAGSDAPSLATVAGTCVDHAVVPPGGEEPRMHCAVDGEWLVPIGQCLCQAGYEKVEDACQACSPGFFKFEASESPCLECPEHTLPSPEGATSCECEEGFFRAPQDPASMPCTRPPSAPHYLTAVGMGAKVELRWTPPQDSGGREDIVYSVTCEQCWPESGECGPCEASVRYSEPPHGLTRTSVTVSDLEPHMNYTFTVEARNGVSGLVTSRSFRTASVSINQTEPPKVRLEGRSTTSLSVSWSIPPPQQSRVWKYEVTYRKKGDSNSYNVRRTEGFSVTLDDLAPDTTYLVQVQALTQEGQGAGSKVHEFQTLSPEGSGNLAVIGGVAVGVVLLLVLAGVGFFIHRRRKNQRARQSPEDVYFSKSEQLKPLKTYVDPHTYEDPNQAVLKFTTEIHPSCVTRQKVIGAGEFGEVYKGMLKTSSGKKEVPVAIKTLKAGYTEKQRVDFLSEAGIMGQFSHHNIIRLEGVISKYKPMMIITEYMENGALDKFLREKDGEFSVLQLVGMLRGIAAGMKYLANMNYVHRDLAARNILVNSNLVCKVSDFGLSRVLEDDPEATYTTSGGKIPIRWTAPEAISYRKFTSASDVWSFGIVMWEVMTYGERPYWELSNHEVMKAINDGFRLPTPMDCPSAIYQLMMQCWQQERARRPKFADIVSILDKLIRAPDSLKTLADFDPRVSIRLPSTSGSEGVPFRTVSEWLESIKMQQYTEHFMAAGYTAIEKVVQMTNDDIKRIGVRLPGHQKRIAYSLLGLKDQVNTVGIPI

SEQ ID NO: 73 - protein, 976 aa, Homo sapiens
MELQAARACFALLWGCALAAAAAAQGKEVVLLDFAAAGGELGWLTHPYGKGWDLMQNIMNDMPIYMYSVCNVMSGDQDNWLRTNWVYRGEAERIFIELKFTVRDCNSFPGGASSCKETFNLYYAESDLDYGTNFQKRLFTKIDTIAPDEITVSSDFEARHVKLNVEERSVGPLTRKGFYLAFQDIGACVALLSVRVYYKKCPELLQGLAHFPETIAGSDAPSLATVAGTCVDHAVVPPGGEEPRMHCAVDGEWLVPIGQCLCQAGYEKVEDACQACSPGFFKFEASESPCLECPEHTLPSPEGATSCECEEGFFRAPQDPASMPCTRPPSAPHYLTAVGMGAKVELRWTPPQDSGGREDIVYSVTCEQCWPESGECGPCEASVRYSEPPHGLTRTSVTVSDLEPHMNYTFTVEARNGVSGLVTSRSFRTASVSINQTEPPKVRLEGRSTTSLSVSWSIPPPQQSRVWKYEVTYRKKGDSNSYNVRRTEGFSVTLDDLAPDTTYLVQVQALTQEGQGAGSKVHEFQTLSPEGSGNLAVIGGVAVGVVLLLVLAGVGFFIHRRRKNQRARQSPEDVYFSKSEQLKPLKTYVDPHTYEDPNQAVLKFTTEIHPSCVTRQKVIGAGEFGEVYKGMLKTSSGKKEVPVAIKTLKAGYTEKQRVDFLGEAGIMGQFSHHNIIRLEGVISKYKPMMIITEYMENGALDKFLREKDGEFSVLQLVGMLRGIAAGMKYLANMNYVHRDLAARNILINSNLVCKVSDFGLSRVLEDDPEATYTTSGGKIPIRWTAPEAISYRKFTSASDVWSFGIVMWEVMTYGERPYWELSNHEVMKAINDGFRLPTPMDCPSAIYQLMMQCWQQERARRPKFADIVSILDKLIRAPDSLKTLADFDPRVSIRLPSTSGSEGVPFRTVSEWLESIKMQQYTEHFMAAGYTAIEKVVQMTNDDIKRIGVRLPGHQKRIAYSLLGLKDQVNTVGIPI

SEQ ID NO: 74 - protein, 976 aa, Homo sapiens
MELQAARACFALLWGCALAAAAAAQGKEVVLLDFAAAGGELGWLTHPYGKGWDLMQNIMNDMPIYMYSVCNVMSGDQDNWLRTNWVYRGEAERIFIELKFTVRDCNSFPGGASSCKETFNLYYAESDLDYGTNFQKRLFTKIDTIAPDEITVSSDFEARHVKLNVEERSVGPLTRKGFYLAFQDIGACVALLSVRVYYKKCPELLQGLAHFPETIAGSDAPSLATVAGTCVDHAVVPPGGEEPRMHCAVDGEWLVPIGQCLCQAGYEKVEDACQACSPGFFKFEASESPCLECPEHTLPSPEGATSCECEEGFFRAPQDPASMPCTRPPSAPHYLTAVGMGAKVELRWTPPQDSGGREDIVYSVTCEQCWPESGECGPCEASVRYSEPPHGLTRTSVTVSDLEPHMNYTFTVEARNGVSGLVTSRSFRTASVSINQTEPPKVRLEGRSTTSLSVSWSIPPPQQSRVWKYEVTYRKKGDSNSYNVRRTEGFSVTLDDLAPDTTYLVQVQALTQEGQGAGSKVHEFQTLSPEGSGNLAVIGGVAVGVVLLLVLAGVGFFIHRRRKNQRARQSPEDVYFSKSEQLKPLKTYVDPHTYEDPNQAVLKFTTEIHPSCVTRQKVIGAGEFGEVYKGMLKTSSGKKEVPVAIKTLKAGYTEKQRVDFLGEAGIMGQFSHHNIIRLEGVISKYKPMMIITEYMENGALDKFLREKDGEFSVLQLVGMLRGIAAGMKYLANMNYVHRDLAARNILVNSNLVCKVSDFGLSRVLEDDPEATYTTSGGKIPIRWTAPEAISYRKFTSASDVWSFGIVMWEVMTYGERPYWELSNHEVMKAINDGFRRPTPMDCPSAIYQLMMQCWQQERARRPKFADIVSILDKLIRAPDSLKTLADFDPRVSIRLPSTSGSEGVPFRTVSEWLESIKMQQYTEHFMAAGYTAIEKVVQMTNDDIKRIGVRLPGHQKRIAYSLLGLKDQVNTVGIPI

SEQ ID NO: 75 - protein, 976 aa, Homo sapiens
MELQAARACFALLWGCALAAAAAAQGKEVVLLDFAAAGGELGWLTHPYGKGWDLMQNIMNDMPIYMYSVCNVMSGDQDNWLRTNWVYRGEAERIFIELKFTVRDCNSFPGGASSCKETFNLYYAESDLDYGTNFQKRLFTKIDTIAPDEITVSSDFEARHVKLNVEERSVGPLTRKGFYLAFQDIGACVALLSVRVYYKKCPELLQGLAHFPETIAGSDAPSLATVAGTCVDHAVVPPGGEEPRMHCAVDGEWLVPIGQCLCQAGYEKVEDACQACSPGFFKFEASESPCLECPEHTLPSPEGATSCECEEGFFRAPQDPASMPCTRPPSAPHYLTAVGMGAKVELRWTPPQDSGGREDIVYSVTCEQCWPESGECGPCEASVRYSEPPHGLTRTSVTVSDLEPHMNYTFTVEARNGVSGLVTSRSFRTASVSINQTEPPKVRLEGRSTTSLSVSWSIPPPQQSRVWKYEVTYRKKGDSNSYNVRRTEGFSVTLDDLAPDTTYLVQVQALTQEGQGAGSKVHEFQTLSPEGSGNLAVIGGVAVGVVLLLVLAGVGFFIHRRRKNQRARQSPEDVYFSKSEQLKPLKTYVDPHTYEDPNQAVLKFTTEIHPSCVTRQKVIGAGEFGEVYKGMLKTSSGKKEVPVAIKTLKAGYTEKQRVDFLGEAGIMGQFSHHNIIRLEGVISKYKPMMIITEYMENGALDKFLREKDGEFSVLQLVGMLRGIAAGMKYLANMNYVHRDLAARNILVNSNLVCKVSDFGLSRVLEDDPEATYTTSGGKIPIRWTAPEAISYRKFTSASDVWSFGIVMWEVMTYGERPYWELSNHEVMKAINDGFRLPTPMDCPSAIYQLMMQCWQQERARRPKFADIVSILDKLIRAPDSLKTLADFDPRVSIRLPSTSGSEGVPFRTVSKWLESIKMQQYTEHFMAAGYTAIEKVVQMTNDDIKRIGVRLPGHQKRIAYSLLGLKDQVNTVGIPI

SEQ ID NO: 76 - protein, 976 aa, Homo sapiens
MELQAARACFALLWGCALAAAAAAQGKEVVLLDFAAAGGELGWLTHPYGKGWDLMQNIMNDMPIYMYSVCNVMSGDQDNWLRTNWVYRGEAERIFIELKFTVRDCNSFPGGASSCKETFNLYYAESDLDYGTNFQKRLFTKIDTIAPDEITVSSDFEARHVKLNVEERSVGPLTRKGFYLAFQDIGACVALLSVRVYYKKCPELLQGLAHFPETIAGSDAPSLATVAGTCVDHAVVPPGGEEPRMHCAVDGEWLVPIGQCLCQAGYEKVEDACQACSPGFFKFEASESPCLECPEHTLPSPEGATSCECEEGFFRAPQDPASMPCTRPPSAPHYLTAVGMGAKVELRWTPPQDSGGREDIVYSVTCEQCWPESGECGPCEASVRYSEPPHGLTRTSVTVSDLEPHMNYTFTVEARNGVSGLVTSRSFRTASVSINQTEPPKVRLEGRSTTSLSVSWSIPPPQQSRVWKYEVTYRKKGDSNSYNVRRTEGFSVTLDDLAPDTTYLVQVQALTQEGQGAGSKVHEFQTLSPEGSGNLAVIGGVAVGVVLLLVLAGVGFFIHRRRKNQRARQSPEDVYFSKSEQLKPLKTYVDPHTYEDPNQAVLKFTTEIHPSCVTRQKVIGAGEFGEVYKGMLKTSSGKKEVPVAIKTLKAGYTEKQRVDFLGEAGIMGQFSHHNIIRLEGVISKYKPMMIITEYMENGALDKFLREKDGEFSVLQLVGMLRGIAAGMKYLANMNYVHRDLAARNILVNSNLVCKVSDFGLSRVLEDDPEATYTTSGGKIPIRWTAPEAISYRKFTSASDVWSFGIVMWEVMTYGERPYWELSNHEVMKAINDGFRLPTPMDCPSAIYQLMMQCWQQERARRPKFADIVSILDKLIRAPDSLKTLADFDPRVSIRLPSTSGSEGVPFRTVSEWLESIKMQQYTEHFMAAGYTAIEKMVQMTNDDIKRIGVRLPGHQKRIAYSLLGLKDQVNTVGIPI

SEQ ID NO: 77 - protein, 976 aa, Homo sapiens
MELQAARACFALLWGCALAAAAAAQGKEVVLLDFAAAGGELGWLTHPYGKGWDLMQNIMNDMPIYMYSVCNVMSGDQDNWLRTNWVYRGEAERIFIELKFTVRDCNSFPGGASSCKETFNLYYAESDLDYGTNFQKRLFTKIDTIAPDEITVSSDFEARHVKLNVEERSVGPLTRKGFYLAFQDIGACVALLSVRVYYKKCPELLQGLAHFPETIAGSDAPSLATVAGTCVDHAVVPPGGEEPRMHCAVDGEWLVPIGQCLCQAGYEKVEDACQACSPGFFKFEASESPCLECPEHTLPSPEGATSCECEEGFFRAPQDPASMPCTRPPSAPHYLTAVGMGAKVELRWTPPQDSGGREDIVYSVTCEQCWPESGECGPCEASVRYSEPPHGLTRTSVTVSDLEPHMNYTFTVEARNGVSGLVTSRSFRTASVSINQTEPPKVRLEGRSTTSLSVSWSIPPPQQSRVWKYEVTYRKKGDSNSYNVRRTEGFSVTLDDLAPDTTYLVQVQALTQEGQGAGSKVHEFQTLSPEGSGNLAVIGGVAVGVVLLLVLAGVGFFIHRRRKNQRARQSPEDVYFSKSEQLKPLKTYVDPHTYEDPNQAVLKFTTEIHPSCVTRQKVIGAGEFGEVYKGMLKTSSGKKEVPVAIKTLKAGYTEKQRVDFLGEAGIMGQFSHHNIIRLEGVISKYKPMMIITEYMENGALDKFLREKDGEFSVLQLVGMLRGIAAGMKYLANMNYVHRDLAARNILVNSNLVCKVSDFGLSRVLEDDPEATYTTSGGKIPIRWTAPEAISYRKFTSASDVWSFGIVMWEVMTYGERPYWELSNHEVMKAINDGFRLPTPMDCPSAIYQLMMQCWQQERARRPKFADIVSILDKLIRAPDSLKTLADFDPRVSIRLPSTSGSEGVPFRTVSEWLESIKMQQYTEHFMAAGYTAIEKVVQMTNDDIKRIGVWLPGHQKRIAYSLLGLKDQVNTVGIPI

SEQ ID NO: 78 - protein, 983 aa, Homo sapiens
MDCQLSILLLLSCSVLDSFGELIPQPSNEVNLLDSKTIQGELGWIFYPSHGWEEISGVDEHYTPIRTYQVCNVMDHSQNNWLRTNWVPRNSAQKIYVELKFTLRDCNSIPLVLGTCKETFNLYYMESDDDHGVKFREHQFTKIDTIAADESFTQMDLGDRILKLNTEIREVGPVNKKGFYLAFQDVGACVALVSVRVYFKKCPFTVKNLAMFPDTVPMDSQSLVEVRGSCVNNSKEEDPPRMYCSTEGEWLVPIGKCSCNAGYEERGFMCQACRPGFYKALDGNMKCAKCPPHSSTQEDGSMNCRCENNYFRADKDPPSMACTRPPSSPRNVISNINETSVILDWSWPLDTGGRKDVTFNIICKKCGWNIKQCEPCSPNVRFLPRQFGLTNTTVTVTDLLAHTNYTFEIDAVNGVSELSSPPRQFAAVSITTNQAAPSPVLTIKKDRTSRNSISLSWQEPEHPNGIILDYEVKYYEKQEQETSYTILRARGTNVTISSLKPDTIYVFQIRARTAAGYGTNSRKFEFETSPDSFSISGESSQVVMIAISAAVAIILLTVVIYVLIGRFCGYKSKHGADEKRLHFGNGHLKLPGLRTYVDPHTYEDPTQAVHEFAKELDATNISIDKVVGAGEFGEVCSGRLKLPSKKEISVAIKTLKVGYTEKQRRDFLGEASIMGQFDHPNIIRLEGVVTKSKPVMIVTEYMENGSLDSFLRKHDAQFTVIQLVGMLRGIASGMKYLSDMGYVHRDLAARNILINSNLVCKVSDFGLSRVLEDDPEAAYTTRGGKIPIRWTSPEAIAYRKFTSASDVWSYGIVLWEVMSYGERPYWEMSNQDVIKAVDEGYRLPPPMDCPAALYQLMLDCWQKDRNNRPKFEQIVSILDKLIRNPGSLKIITSAAARPSNLLLDQSNVDITTFRTTGDWLNGVWTAHCKEIFTGVEYSSCDTIAKISTDDMKKVGVTVVGPQKKIISSIKALETQSKNGPVPV

SEQ ID NO: 79 - protein, 983 aa, Homo sapiens
MDCQLSILLLLSCSVLDSFGELIPQPSNEVNLLDSKTIQGELGWISYPSHGWKEISGVDEHYTPIRTYQVCNVMDHSQNNWLRTNWVPRNSAQKIYVELKFTLRDCNSIPLVLGTCKETFNLYYMESDDDHGVKFREHQFTKIDTIAADESFTQMDLGDRILKLNTEIREVGPVNKKGFYLAFQDVGACVALVSVRVYFKKCPFTVKNLAMFPDTVPMDSQSLVEVRGSCVNNSKEEDPPRMYCSTEGEWLVPIGKCSCNAGYEERGFMCQACRPGFYKALDGNMKCAKCPPHSSTQEDGSMNCRCENNYFRADKDPPSMACTRPPSSPRNVISNINETSVILDWSWPLDTGGRKDVTFNIICKKCGWNIKQCEPCSPNVRFLPRQFGLTNTTVTVTDLLAHTNYTFEIDAVNGVSELSSPPRQFAAVSITTNQAAPSPVLTIKKDRTSRNSISLSWQEPEHPNGIILDYEVKYYEKQEQETSYTILRARGTNVTISSLKPDTIYVFQIRARTAAGYGTNSRKFEFETSPDSFSISGESSQVVMIAISAAVAIILLTVVIYVLIGRFCGYKSKHGADEKRLHFGNGHLKLPGLRTYVDPHTYEDPTQAVHEFAKELDATNISIDKVVGAGEFGEVCSGRLKLPSKKEISVAIKTLKVGYTEKQRRDFLGEASIMGQFDHPNIIRLEGVVTKSKPVMIVTEYMENGSLDSFLRKHDAQFTVIQLVGMLRGIASGMKYLSDMGYVHRDLAARNILINSNLVCKVSDFGLSRVLEDDPEAAYTTRGGKIPIRWTSPEAIAYRKFTSASDVWSYGIVLWEVMSYGERPYWEMSNQDVIKAVDEGYRLPPPMDCPAALYQLMLDCWQKDRNNRPKFEQIVSILDKLIRNPGSLKIITSAAARPSNLLLDQSNVDITTFRTTGDWLNGVWTAHCKEIFTGVEYSSCDTIAKISTDDMKKVGVTVVGPQKKIISSIKALETQSKNGPVPV

SEQ ID NO: 80 - protein, 983 aa, Homo sapiens
MDCQLSILLLLSCSVLDSFGELIPQPSNEVNLLDSKTIQGELGWISYPSHGWEEISGVDEHYTPIRTYQVCNVMDHSQNNWLRTNWVPRNSAQKIYVELKFTLRDCNSIPLVLGTCKETFNLYYMESDDDHGVKFREHQFTKIDTIAADESFTQMDLGDRILKLNTEIREVGPVNKKGFYLAFQDVGACVALVSVRVYFKKCPFTVKNLAMFPDTVPMDSQSLVEVRGSCVNNSKEEDPPRMYCSTEGEWLVPIGKCSCNAGYEERGFMCQACRPGFYKALDGNMKCAKCPPHSSTQEDGSMNCRCENNYFRADKDPPSMACTRPPSSPRNVISNINETSVILDWSWPLDTGGRKDVTFNIICKKCGWNIKQCEPCSPNVRFLPRQFGLTNTTVTVTDLLAHTNYTFEIDAVNGVSELSSPPRQFAAVSITTNQAAPSPVLTIKKDRTSRNSISLSWQEPEHPNGIILDYEVKYYEKQEQETSYTILRARGTNVTISSLKPDTIYVFQIRARTAAGYGTNSRKFEFETSPDSFSISGESSQVVMIAISAAVAIILLTVVIYVLIGRFCGYKSKHGADEKRLHFGNGHLKLPGLRTYVDPHTYEDPTQAVHEFAKELDATNISIDKVVGAGEFGEVCSGRLKLPSKKEISVAIKTLKVGYTEKQRRDFLGEASIMGQFDHPNIIRLEGVVTKSKPVMIVTEYMENGSLDSFLRKHDAQFTVIQLVGMLRGIASGMKYLSDMGYVHRDLAARNILINSNLVCKVSDFGLSRVLEDDPEGAYTTRGGKIPIRWTSPEAIAYRKFTSASDVWSYGIVLWEVMSYGERPYWEMSNQDVIKAVDEGYRLPPPMDCPAALYQLMLDCWQKDRNNRPKFEQIVSILDKLIRNPGSLKIITSAAARPSNLLLDQSNVDITTFRTTGDWLNGVWTAHCKEIFTGVEYSSCDTIAKISTDDMKKVGVTVVGPQKKIISSIKALETQSKNGPVPV

SEQ ID NO: 81 - protein, 986 aa, Homo sapiens
MAGIFYFALFSCLFGICDAVTGSRVYPANEVTLLDSRSVQGELGWIASPLEGGWEEVSIMDEKNTPIRTYQVCNVMEPSQNNWLRTDWITREGAQRVYIEIKFTLRDCNSLPGVMGTCKETFNLYYYESDNDKERFIRENQFVKIDTIAADESFTQVDIGDRIMKLNTEIRDVGPLSKKGFYLAFQDVGACIALVSVRVFYKKCPLTVRNLAQFPDTITGADTSSLVEVRGSCFNNSEEKDVPKMYCGADGEWLVPIGNCLCNAGHEERSGECQACKIGYYKALSTDATCAKCPPHSYSVWEGATSCTCDRGFFRADNDAASMPCTRPPSAPLNLISNVNETSVNLEWSSPQNTGGRQDISYNVVCKKCGAGDPSKCRPCGSGVHYTPQQNGLKTTKVSITDLLAHTNYTFEIWAVNGVSKYNPNPDQSVSVTVTTNQAAPSSIALVQAKEVTRYSVALAWLEPDRPNGVILEYEVKYYEKDQNERSYRIVRTAARNTDIKGLNPLTSYVFHVRARTAAGYGDFSEPLEVTTNTVPSRIIGDGANSTVLLVSVSGSVVLVVILIAAFVISRRRSKYSKAKQEADEEKHLNQGVRTYVDPFTYEDPNQAVREFAKEIDASCIKIEKVIGVGEFGEVCSGRLKVPGKREICVAIKTLKAGYTDKQRRDFLSEASIMGQFDHPNIIHLEGVVTKCKPVMIITEYMENGSLDAFLRKNDGRFTVIQLVGMLRGIGSGMKYLSDMSYVHRDLAARNILVNSNLVCKVSDFGMSRVLEDDPEAAYTTRGGKIPIRWTAPEAIAYRKFTSASDVWSYGIVMWEVMSYGERPYWDMSNQDVIKAIEEGYRLPPPMDCPIALHQLMLDCWQKERSDRPKFGQIVNMLDKLIRNPNSLKRTGTESSRPNTALLDPSSPEFSAVVSVGDWLQAIKMDRYKDNFTAAGYTTLEAVVHVNQEDLARIGITAITHQNKILSSVQAMRTQMQQMHGRMVPV

SEQ ID NO: 82 - protein, 986 aa, Homo sapiens
MAGIFYFALFSCLFGICDAVTGSRVYPANEVTLLDSRSVQGELGWIASPLEGGWEEVSIMDEKNTPIRTYQVCNVMEPSQNNWLRTDWITREGAQRVYIEIKFTLRDCNSLPGVMGTCKETFNLYYYESDNDKERFIRENQFVKIDTIAADESFTQVDIGDRIMKLNTEIRDVGPLSKKGFYLAFQDVGACIALVSVRVFYKKCPLTVRNLAQFPDTITGADTSSLVEVRGSCVNNSEEKDVPKMYCGADGEWLVPIGNCLCNAGHEERSGECQACKIGYYKALSTDATCAKCPPHSYSVWEGATSCTCDRGFFRADNDAASMPCTRPPSAPLNLISNVNETSVNLEWSSPQNTGGRQDISYNVVCKKCGAGDPSKCRPCGSGVHYTPQQNGLKTTKVSITDLLAHTNYTFEIWAVNGVSKYNPNPDQSVSVTVTTNQAAPSSIALVQAKEVTRYSVALAWLEPDRPNGVILEYEVKYYEKDQNERSYRIVRTAARNTDIKGLNPLTSYVFHVRARTAAGYGDFSEPLEVTTNTVPSRIIGDGANSTVLLVSVSGSVVLVVILIAAFVISRRRSKYSKAKQEADEEKHLNQGVRTYVDPFTYEDPNQAVREFAKEIDASCIKIEKVIGVGEFGEVCSGRLKVPGKREICVAIKTLKAGYTDKQRRDFLSEASIMGQFDHPNIIHLEGVVTKCKPVMIITEYMENGSLDAFLRKNDGRFTVIQLVGMLRGIGSGMKYLSDMSYVHRDLAARNILVNSNLVCKVSDFGMSRVLEDDPEAAYTTRGGKIPIRWTAPEAIAYRKFTAASDVWSYGIVMWEVMSYGERPYWDMSNQDVIKAIEEGYRLPPPMDCPIALHQLMLDCWQKERSDRPKFGQIVNMLDKLIRNPNSLKRTGTESSRPNTALLDPSSPEFSAVVSVGDWLQAIKMDRYKDNFTAAGYTTLEAVVHVNQEDLARIGITAITHQNKILSSVQAMRTQMQQMHGRMVPV

SEQ ID NO: 83 - protein, 986 aa, Homo sapiens
MAGIFYFALFSCLFGICDAVTGSRVYPANEVTLLDSRSVQGELGWIASPLEGGWEEVSIMDEKNTPIRTYQVCNVMEPSQNNWLRTDWITREGAQRVYIEIKFTLRDCNSLPGVMGTCKETFNLYYYESDNDKERFIRENQFVKIDTIAADESFTQVDIGDRIMKLNTEIRDVGPLSKKGFYLAFQDVGACIALVSVRVFYKKCPLTVRNLAQFPDTITGADTSSLVEVRGSCVNNSEEKDVPKMYCGADGEWLVPIGNCLCNAGHEERSGECQACKIGYYKALSTDATCAKCPPHSYSVWEGATSCTCDRGFFRADNDAASMPCTRPPSAPLNLISNVNETSVNLEWSSPQNTGGRQDISYNVVCKKCGAGDPSKCRPCGSGVHYTPQQNGLKTTKVSITDLLAHTNYTFEIWAVNGVSKYNPNPDQSVSVTVTTNQAAPSSIALVQAKEVTRYSVALAWLEPDRPNGVILEYEVKYYEKDQNERSYRIVRTAARNTDIKGLNPLTSYVFHVRARTAAGYGDFSEPLEVTTNTVPSRIIGDGANSTVLLVSVSGSVVLVVILIAAFVISRRRSKYSKAKQEADEEKHLNQGVRTYVDPFTYEDPNQAVREFAKEIDASCIKIEKVIGVGEFGEVCSGRLKVPGKREICVAIKTLKAGYTDKQRRDFLSEASIMGQFDHPNIIHLEGVVTKCKPVMIITEYMENGSLDAFLRKNDGRFTVIQLVGMLRGIGSGMKYLSDMSYVHRDLAARNILVNSNLVCKVSDFGMSRVLEDDPEAAYTTRGGKIPIRWTAPEAIAYRKFTSASDVWSYGIVMWEVMSYGERPYWDMSNQDVIKAIEEGYRLPPPMDCPIALHQLMLDCWQKERSDRPKFGQIVNVLDKLIRNPNSLKRTGTESSRPNTALLDPSSPEFSAVVSVGDWLQAIKMDRYKDNFTAAGYTTLEAVVHVNQEDLARIGITAITHQNKILSSVQAMRTQMQQMHGRMVPV

SEQ ID NO: 84 - protein, 1037 aa, Homo sapiens
MRGSGPRGAGHRRPPSGGGDTPITPASLAGCYSAPRRAPLWTCLLLCAALRTLLASPSNEVNLLDSRTVMGDLGWIAFPKTGWEEIGEVDENYAPIHTYQVCKVMEQNQNNWLLTSWISNEGASRIFIELKFTLRDCNSLPGGLGTCKETFNMYYFESDDQNGRNIKENQYIKIDTIAADESFTELDLGDRVMKLNTEVRDVGPLSKKGFYLAFQDVGACIALVSVRVYYKKCPSVVRHLAVFPDTITGADSSQLLEVSGSCVNHSVTDEPPKMHCSAEGEWLVPIGKCMCKAGYEEKNGTCQVCRPGFFKASPHIQSCGKCPPHSYTHEEASTSCVCEKDYFRRESDPPTMACTRPPSAPRNAISNVNETSVFLEWIPPADTGGRKDVSYYIACKKCNSHAGVCEECGGHVRYLPRQSGLKNTSVMMVDLLAHTNYTFEIEAVNGVSDLSPGARQYVSVNVTTNQAAPSPVTNVKKGKIAKNSISLSWQEPDRPNGIILEYEIKYFEKDQETSYTIIKSKETTITAEGLKPASVYVFQIRARTAAGYGVFSRRFEFETTPVFAASSDQSQIPVIAVSVTVGVILLAVVIGVLLSGSCCECGCGRASSLCAVAHPSLIWRCGYSKAKQDPEEEKMHFHNGHIKLPGVRTYIDPHTYEDPNQAVHEFAKEIEASCITIERVIGAGEFGEVCSGRLKLPGKRELPVAIKTLKVGYTEKQRRDFLGEASIMGQFDHPNIIHLEGVVTKSKPVMIVTEYMENGSLDTFLKKNDGQFTVIQLVGMLRGISAGMKYLSDMGYVHRDLAARNILINSNLVCKVSDFGLSRVLEDDPEAAYTTRGGKIPIRWTAPEAIAFRKFTSASDVWSYGIVMWEVVSYGERPYWEMTNQDVIKAVEEGYRLPSPMDCPAALYQLMLDCWQKERNSRPKFDEIVNMLDKLIRNPSSLKTLVNASCRVSNLLAEHSPLGSGAYRSVGEWLEAIKMGRYTEIFMENGYSSMDAVAQVTLEDLRRLGVTLVGHQKKIMNSLQEMKVQLVNGMVPL

SEQ ID NO: 85 - protein, 1037 aa, Homo sapiens
MRGSGPRGAGHRRPPSGGGDTPITPASLAGCYSAPRRAPLWTCLLLCAALRTLLASPSNEVNLLDSRTVMGDLGWIAFPKNGWEKIGEVDENYAPIHTYQVCKVMEQNQNNWLLTSWISNEGASRIFIELKFTLRDCNSLPGGLGTCKETFNMYYFESDDQNGRNIKENQYIKIDTIAADESFTELDLGDRVMKLNTEVRDVGPLSKKGFYLAFQDVGACIALVSVRVYYKKCPSVVRHLAVFPDTITGADSSQLLEVSGSCVNHSVTDEPPKMHCSAEGEWLVPIGKCMCKAGYEEKNGTCQVCRPGFFKASPHIQSCGKCPPHSYTHEEASTSCVCEKDYFRRESDPPTMACTRPPSAPRNAISNVNETSVFLEWIPPADTGGRKDVSYYIACKKCNSHAGVCEECGGHVRYLPRQSGLKNTSVMMVDLLAHTNYTFEIEAVNGVSDLSPGARQYVSVNVTTNQAAPSPVTNVKKGKIAKNSISLSWQEPDRPNGIILEYEIKYFEKDQETSYTIIKSKETTITAEGLKPASVYVFQIRARTAAGYGVFSRRFEFETTPVFAASSDQSQIPVIAVSVTVGVILLAVVIGVLLSGSCCECGCGRASSLCAVAHPSLIWRCGYSKAKQDPEEEKMHFHNGHIKLPGVRTYIDPHTYEDPNQAVHEFAKEIEASCITIERVIGAGEFGEVCSGRLKLPGKRELPVAIKTLKVGYTEKQRRDFLGEASIMGQFDHPNIIHLEGVVTKSKPVMIVTEYMENGSLDTFLKKNDGQFTVIQLVGMLRGISAGMKYLSDMGYVHRDLAARNILINSNLVCKVSDFGLSRVLEDDPEAAYTTRGGKIPIRWTAPEAIAFRKFTSASDVWSYGIVMWEVVSYGERPYWEMTNQDVIKAVEEGYRLPSPMDCPAALYQLMLDCWQKERNSRPKFDEIVNMLDKLIRNPSSLKTLVNASCRVSNLLAEHSPLGSGAYRSVGEWLEAIKMGRYTEIFMENGYSSMDAVAQVTLEDLRRLGVTLVGHQKKIMNSLQEMKVQLVNGMVPL

SEQ ID NO: 86 - protein, 1037 aa, Homo sapiens
MRGSGPRGAGHRRPPSGGGDTPITPASLAGCYSAPRRAPLWTCLLLCAALRTLLASPSNEVNLLDSRTVMGDLGWIAFPKNGWEEIGEVDENYAPIHTYQVCKVMEQNQNNWLLTSWISNEGASRIFIELKFTLRDCNSLPGGLGTCKETFNMYYFESDDQNGRNIKENQYIKIDTIAADESFTELDLGDRVMKLNTEVRDVGPLSKKGFYLAFQDVGACIALVSVRVYYKKCPSVVRHLAVFPDTITGADSSQLLEVSGSCVNHSVTDEPPKMHCSAEGEWLVPIGKCMCKAGYEEKNGTCQVCRPGFFKASPHIQSCGKCPPHSYTHEEASTSCVCEKDYFRRESDPPTMACTRPPSAPRNAISNVNETSVFLEWIPPADTGGRKDVSYYIACKKCNSHAGVCEECGGHVRYLPRQSGLKNTSVMMVDLLAHTNYTFEIEAVNGVSDLSPGARQYVSVNVTTNQAAPSPVTNVKKGKIAKNSISLSWQEPDRPNGIILEYEIKYFEKDQETSYTIIKSKETTITAEGLKPASVYVFQIRARTAAGYGVFSRRFEFETTPVFAASSDQSQIPVIAVSVTVGVILLAVVIGVLLSGSCCECGCGRASSLCAVAHPSLIWRCGYSKAKQDPEEEKMHFHNGHIKLPGVRTYIDPHTYEDPNQAVHEFAKEIETSCITIERVIGAGEFGEVCSGRLKLPGKRELPVAIKTLKVGYTEKQRRDFLGEASIMGQFDHPNIIHLEGVVTKSKPVMIVTEYMENGSLDTFLKKNDGQFTVIQLVGMLRGISAGMKYLSDMGYVHRDLAARNILINSNLVCKVSDFGLSRVLEDDPEAAYTTRGGKIPIRWTAPEAIAFRKFTSASDVWSYGIVMWEVVSYGERPYWEMTNQDVIKAVEEGYRLPSPMDCPAALYQLMLDCWQKERNSRPKFDEIVNMLDKLIRNPSSLKTLVNASCRVSNLLAEHSPLGSGAYRSVGEWLEAIKMGRYTEIFMENGYSSMDAVAQVTLEDLRRLGVTLVGHQKKIMNSLQEMKVQLVNGMVPL

SEQ ID NO: 87 - protein, 1037 aa, Homo sapiens
MRGSGPRGAGHRRPPSGGGDTPITPASLAGCYSAPRRAPLWTCLLLCAALRTLLASPSNEVNLLDSRTVMGDLGWIAFPKNGWEEIGEVDENYAPIHTYQVCKVMEQNQNNWLLTSWISNEGASRIFIELKFTLRDCNSLPGGLGTCKETFNMYYFESDDQNGRNIKENQYIKIDTIAADESFTELDLGDRVMKLNTEVRDVGPLSKKGFYLAFQDVGACIALVSVRVYYKKCPSVVRHLAVFPDTITGADSSQLLEVSGSCVNHSVTDEPPKMHCSAEGEWLVPIGKCMCKAGYEEKNGTCQVCRPGFFKASPHIQSCGKCPPHSYTHEEASTSCVCEKDYFRRESDPPTMACTRPPSAPRNAISNVNETSVFLEWIPPADTGGRKDVSYYIACKKCNSHAGVCEECGGHVRYLPRQSGLKNTSVMMVDLLAHTNYTFEIEAVNGVSDLSPGARQYVSVNVTTNQAAPSPVTNVKKGKIAKNSISLSWQEPDRPNGIILEYEIKYFEKDQETSYTIIKSKETTITAEGLKPASVYVFQIRARTAAGYGVFSRRFEFETTPVFAASSDQSQIPVIAVSVTVGVILLAVVIGVLLSGSCCECGCGRASSLCAVAHPSLIWRCGYSKAKQDPEEEKMHFHNGHIKLPGVRTYIDPHTYEDPNQAVHEFAKEIEASCITIERVIGAGEFGEVCSGRLKLPGKRELPVAIKTLKVGYTEKQRRDFLGEASIMGQFDHPNIIHLEGVVTKSKPVMIVTEYMENGSLDTFLKKNDGQFTVIQLVGMLRGISAGMKYLSDMGYVHRDLAARNILINSNLVCKVSDFGLSRVLEDDPEAAYTTRGGKIPIRWTAPEAIAFRKFTSASDVWSYGIVMWEVVSYGERPYWEMTNQDVIKALEEGYRLPSPMDCPAALYQLMLDCWQKERNSRPKFDEIVNMLDKLIRNPSSLKTLVNASCRVSNLLAEHSPLGSGAYRSVGEWLEAIKMGRYTEIFMENGYSSMDAVAQVTLEDLRRLGVTLVGHQKKIMNSLQEMKVQLVNGMVPL

SEQ ID NO: 88 - protein, 1037 aa, Homo sapiens
MRGSGPRGAGHRRPPSGGGDTPITPASLAGCYSAPRRAPLWTCLLLCAALRTLLASPSNEVNLLDSRTVMGDLGWIAFPKNGWEEIGEVDENYAPIHTYQVCKVMEQNQNNWLLTSWISNEGASRIFIELKFTLRDCNSLPGGLGTCKETFNMYYFESDDQNGRNIKENQYIKIDTIAADESFTELDLGDRVMKLNTEVRDVGPLSKKGFYLAFQDVGACIALVSVRVYYKKCPSVVRHLAVFPDTITGADSSQLLEVSGSCVNHSVTDEPPKMHCSAEGEWLVPIGKCMCKAGYEEKNGTCQVCRPGFFKASPHIQSCGKCPPHSYTHEEASTSCVCEKDYFRRESDPPTMACTRPPSAPRNAISNVNETSVFLEWIPPADTGGRKDVSYYIACKKCNSHAGVCEECGGHVRYLPRQSGLKNTSVMMVDLLAHTNYTFEIEAVNGVSDLSPGARQYVSVNVTTNQAAPSPVTNVKKGKIAKNSISLSWQEPDRPNGIILEYEIKYFEKDQETSYTIIKSKETTITAEGLKPASVYVFQIRARTAAGYGVFSRRFEFETTPVFAASSDQSQIPVIAVSVTVGVILLAVVIGVLLSGSCCECGCGRASSLCAVAHPSLIWRCGYSKAKQDPEEEKMHFHNGHIKLPGVRTYIDPHTYEDPNQAVHEFAKEIEASCITIERVIGAGEFGEVCSGRLKLPGKRELPVAIKTLKVGYTEKQRRDFLGEASIMGQFDHPNIIHLEGVVTKSKPVMIVTEYMENGSLDTFLKKNDGQFTVIQLVGMLRGISAGMKYLSDMGYVHRDLAARNILINSNLVCKVSDFGLSRVLEDDPEAAYTTRGGKIPIRWTAPEAIAFRKFTSASDVWSYGIVMWEVVSYGERPYWEMTNQDVIKAVEEGYRLPSPMDCPAALYQLMLDCWQKERNSRPKFDEIVNMLDKLIRNPSSLKTLVNASCRVSNLLTEHSPLGSGAYRSVGEWLEAIKMGRYTEIFMENGYSSMDAVAQVTLEDLRRLGVTLVGHQKKIMNSLQEMKVQLVNGMVPL

SEQ ID NO: 89 - protein, 1037 aa, Homo sapiens
MRGSGPRGAGHRRPPSGGGDTPITPASLAGCYSAPRRAPLWTCLLLCAALRTLLASPSNEVNLLDSRTVMGDLGWIAFPKNGWEEIGEVDENYAPIHTYQVCKVMEQNQNNWLLTSWISNEGASRIFIELKFTLRDCNSLPGGLGTCKETFNMYYFESDDQNGRNIKENQYIKIDTIAADESFTELDLGDRVMKLNTEVRDVGPLSKKGFYLAFQDVGACIALVSVRVYYKKCPSVVRHLAVFPDTITGADSSQLLEVSGSCVNHSVTDEPPKMHCSAEGEWLVPIGKCMCKAGYEEKNGTCQVCRPGFFKASPHIQSCGKCPPHSYTHEEASTSCVCEKDYFRRESDPPTMACTRPPSAPRNAISNVNETSVFLEWIPPADTGGRKDVSYYIACKKCNSHAGVCEECGGHVRYLPRQSGLKNTSVMMVDLLAHTNYTFEIEAVNGVSDLSPGARQYVSVNVTTNQAAPSPVTNVKKGKIAKNSISLSWQEPDRPNGIILEYEIKYFEKDQETSYTIIKSKETTITAEGLKPASVYVFQIRARTAAGYGVFSRRFEFETTPVFAASSDQSQIPVIAVSVTVGVILLAVVIGVLLSGSCCECGCGRASSLCAVAHPSLIWRCGYSKAKQDPEEEKMHFHNGHIKLPGVRTYIDPHTYEDPNQAVHEFAKEIEASCITIERVIGAGEFGEVCSGRLKLPGKRELPVAIKTLKVGYTEKQRRDFLGEASIMGQFDHPNIIHLEGVVTKSKPVMIVTEYMENGSLDTFLKKNDGQFTVIQLVGMLRGISAGMKYLSDMGYVHRDLAARNILINSNLVCKVSDFGLSRVLEDDPEAAYTTRGGKIPIRWTAPEAIAFRKFTSASDVWSYGIVMWEVVSYGERPYWEMTNQDVIKAVEEGYRLPSPMDCPAALYQLMLDCWQKERNSRPKFDEIVNMLDKLIRNPSSLKTLVNASCRVSNLLAEHSPLGSGAYRSVGEWLEAIKMGLYTEIFMENGYSSMDAVAQVTLEDLRRLGVTLVGHQKKIMNSLQEMKVQLVNGMVPL

SEQ ID NO: 90 - protein, 712 aa, Homo sapiens
MAATEERSLHNFFANRDKKKKEQSNRAASSAGAAGSAAGAVELRILEGGGAGAGTWLGEGRTASAEAAGPGATTKAVKNGKAWSKKSREGGYCAEPLALLVKFGRPARRRVGLTAAAELSPDGSACPRHSPPPAVEMWRTRARSCARALSPAQVNSPRASGTLWWMQFPSPPAARSSPAPQAASSSEAAAPATGQPGPSCPVPGTSRRGRPGTPPAGRVEEEEEEEEEDVDKDPHPTQNTCLRCRHFSLRERKREPRRTMGGCEVREFLLQFGFFLPLLTAWPGDCSHVSHNQVVLLDTTTVLGELGWKTYPLNGWDAITEMDEHNRPIHTYQVCNVMEPNQNNWLRTNWISRDAAQKIYVEMKFTLRDCNSIPWVLGTCKETFNLFYMESDESHGIKFKPNQYTKIDTIAADESFTQMDLGDRILKLNTEIREVGPIERKGFYLAFQDIGACIALVSVRVFYKKCPFTVRNLAMFPDTIPRVDSSSLVEVRGSCVKSAEERDTPKLYCGADGDWLVPLGRCICSTGYEEIEGSCHACRPGFYKAFAGNTKCSKCPPHSLTYMEATSVCQCEKGYFRAEKDPPSMACTRPPSAPRNVVFNINETALILEWSPPSDTGGRKDLTYSVICKKCGLDTSQCEDCGGGLRFIPRHTGLINNSVIVLDFVSHVNYTFEIEAMNGVSELSFSPKPFTAITVTTDQDGKFHCCSLKTDP

SEQ ID NO: 91 - protein, 712 aa, Homo sapiens
MAATEERSLHNFFANRDKKKKEQSNRAASSAGAAGSAAGAVELRILEGGGAGAGTWLGEGRTASAEAAGPGATTKAVKNGKAWSKKSREGGYCAEPLALLVKFGRPARRRVGLTAAAELSPDGSACPRHSPPPAVEMWRTRARSCARALSPAQVNSPRASGTLWWMQFPSPPAARSSPAPQAASSSEAAAPATGQPGPSCPVPGTSRRGRPGTPPAGRVEEEEEEEEEDVDKDPHPTQNTCLRCRHFSLRERKREPRRTMGGCEVREFLLQFGFFLPLLTAWPGDCSHVSNNQVVLLDTTTVLGELGWKTYPLNGWDAITEMDEHNRPIHTYQVCNVMEPNQNNWLRTNWISRDAAQKIYVEMKFTLRDCNSIPWVLGTCKETFNLFYMESDESHGIKFKPNQYTKIDTIAADESFTQMDLGDRILKLNTEIREVGPIERKGFYLAFQDIGACIALVSVRVFYKKCPFTVRNLAMFPDTIPRVDSSSLVEVRGSCVKSAEERDTPKLYCGADEDWLVPLGRCICSTGYEEIEGSCHACRPGFYKAFAGNTKCSKCPPHSLTYMEATSVCQCEKGYFRAEKDPPSMACTRPPSAPRNVVFNINETALILEWSPPSDTGGRKDLTYSVICKKCGLDTSQCEDCGGGLRFIPRHTGLINNSVIVLDFVSHVNYTFEIEAMNGVSELSFSPKPFTAITVTTDQDGKFHCCSLKTDP

SEQ ID NO: 92 - protein, 712 aa, Homo sapiens
MAATEERSLHNFFANRDKKKKEQSNRAASSAGAAGSAAGAVELRILEGGGAGAGTWLGEGRTASAEAAGPGATTKAVKNGKAWSKKSREGGYCAEPLALLVKFGRPARRRVGLTAAAELSPDGSACPRHSPPPAVEMWRTRARSCARALSPAQVNSPRASGTLWWMQFPSPPAARSSPAPQAASSSEAAAPATGQPGPSCPVPGTSRRGRPGTPPAGRVEEEEEEEEEDVDKDPHPTQNTCLRCRHFSLRERKREPRRTMGGCEVREFLLQFGFFLPLLTAWPGDCSHVSNNQVVLLDTTTVLGELGWKTYPLNGWDAITEMDEHNRPIHTYQVCNVMEPNQNNWLRTNWISRDAAQKIYVEMKFTLRDCNSIPWVLGTCKETFNLFYMESDESHGIKFKPNQYTKIDTIAADESFTQMDLGDRILKLNTEIREVGPIERKGFYLAFQDIGACIALVSVRVFYKKCPFTVRNLAMFPDTIPRVDSSSLVEVRGSCVKSAEERDTPKLYCGADGDWLVPLGRCICSTGYEEIEGSCHACRPGFYKAFAGNTKCSKCPPHSLTYMEATSVCQCEKGYFRAEKDPPSMACTRPPSAPRNVVFNINETALILEWSPPSDTGGRKDFTYSVICKKCGLDTSQCEDCGGGLRFIPRHTGLINNSVIVLDFVSHVNYTFEIEAMNGVSELSFSPKPFTAITVTTDQDGKFHCCSLKTDP

SEQ ID NO: 93 - protein, 984 aa, Homo sapiens
MALDYLLLLLLASAVAAMEETLMDTRTATAELGWTANPVSGWEEVSGYDENLNTIRTYQVCNVFEPNQNNWLLTTFINRRGAHRIYTEMRFTVRDCSSLPNVPGSCKETFNLYYYETDSVIATKKSAFWSEAPYLKVDTIAADESFSQVDFGGRLMKVNTEVRSFGPLTRNGFYLAFQDYGACMSLLSVRVFFKKCPSIVQNFAVFPETMTGAESTSLVIARGTCIPNAEEVDVPIKLYCNGDGEWMVPIGRCTCKPGYEPENSVACKACPAGTFKASQEAEGCSHCPSNSRSPAEASPICTCRTGYYRADFDPPEVACTSVPSGPRNVISIVNETSIILEWHPPRETGGRDDVTYNIICKKCRADRRSCSRCDDNVEFVPRQLGLTECRVSISSLWAHTPYTFDIQAINGVSSKSPFPPQHVSVNITTNQAAPSTVPIMHQVSATMRSITLSWPQPEQPNGIILDYEIRYYEKEHNEFNSSMARSQTNTARIDGLRPGMVYVVQVRARTVAGYGKFSGKMCFQTLTDDDYKSELREQLPLIAGSAAAGVVFVVSLVAISIVCSRKRAYSKEAVYSDKLQHYSTGRGSPGMKIYIDPFTYEDPNEAVREFAKEIDVSFVKIEEVIGAGEFGEVYKGRLKLPGKREIYVAIKTLKAGYSEKQRRDFLSEASIMGQFDHPNIIRLEGVVTKSRPVMIITEFMENGALDSFLRQNDGQFTVIQLVGMLRGIAAGMKYLAEMNYVHRDLAARNILVNSNLVCKVSDFGLSRYLQDDTSDPTYTSSLGGKIPVRWTAPEAIAYRKFTSASDVWSYGIVMWEVMSFGERPYWDMSNQDVINAIEQDYRLPPPMDCPAALHQLMLDCWQKDRNSRPRFAEIVNTLDKMIRNPASLKTVATITAVPSQPLLDRSIPDFTAFTTVDDWLSAIKMVQYRDSFLTAGFTSLQLVTQMTSEDLLRIGITLAGHQKKILNSIHSMRVQISQSPTAMA

SEQ ID NO: 94 - protein, 984 aa, Homo sapiens
MALDYLLLLLLASAVAAMEETLMDTRTATAELGWTANPASGWEEVSGYDENLNTIRTYQVCNVFEPNQNNWLLTTFINRRGAHRIYTEMRFTVRDCSSLPNVPGSCKETFNLYYYETDSVIATKKSAFWSEAPYLKVDTIAADESFSQVDFGGRLMKVNTEVRSFGPLTRNGFYLAFQDYGACMSLLSVRVFFKKCPSIVQNFAVFPETMTGAESTSLVIARGTCIPNAEEVDVPIKLYCNGDGEWMVPIGRCTCKPGYEPENSVACKACPAGTFKASQEAEGCSHCPSNSRSPAEASPICTCRTGYYRADFDPPEVACTSVPSGPRNVISIVNETSIILEWHPPRETGGRDDVTYNIICKKCRADRRSCSRCDDNVEFVPRQLGLTECRVSISSLWAHTPYTFDIQAINGVSSKSPFPPQHVSVNITTNQAAPSTVPIMHQVSATMRSITLSWPQPEQPNGIILDYEIRYYEKEHNEFNSSMARSQTNTARIDGLRPGMVYVVQVRARTVAGYGKFSGKMCFQTLTDDDYKSELREQLPLIAGSAAAGVVFVVSLVAISIVCSRKRAYSKEAVYSDKLQHYSTGRGSPGMKIYIDPFTYEDPNEAVREFAKEIDVSFVKIEEVIGAGEFGEVYKGRLKLPGKREIYVAIKTLKAGYSEKQRRDFLSEASIMGQFDHPNIIRLEGVVTKSRPVMIITEFMENGALDSFLRQNDGQFTVIQLVGMLRGIAAGMKYLAEMNYVHRDLAARNILVNSNLVCKVSDFGLSRYLQDDTSDPTYTSSLGGKIPVRWTAPEAIAYRKFTSASDVWSYGIVMWEVMSFGERPYWDMSNQDVINAMEQDYRLPPPMDCPAALHQLMLDCWQKDRNSRPRFAEIVNTLDKMIRNPASLKTVATITAVPSQPLLDRSIPDFTAFTTVDDWLSAIKMVQYRDSFLTAGFTSLQLVTQMTSEDLLRIGITLAGHQKKILNSIHSMRVQISQSPTAMA

SEQ ID NO: 95 - protein, 986 aa, Homo sapiens
MALRRLGAALLLLPLLAAVEETLMDSTTATAELGWMVHPPSGWEEVSGYDENMNTIRTYQVCNVFESSQNNWLRTKFIRRRGVHRIHVEMKFSVRDCSSIPSVPGSCKETFNLYYYEADFDSATKTFPNWMENPWVKVDTIAADESFSQVDLGGRVMKINTEVRSFGPVSRSGFYLAFQDYGGCMSLIAVRVFYRKCPRIIQNGAIFQETLSGAESTSLVAARGSCIANAEEVDVPIKLYCNGDGEWLVPIGRCMCKAGFEAVENGTVCRGCPSGTFKANQGDEACTHCPINSRTTSEGATNCVCRNGYYRADLDPLDMPCTTIPSAPQAVISSVNETSLMLEWTPPRDSGGREDLVYNIICKSCGSGRGACTRCGDNVQYAPRQLGLTEPRIYISDLLAHTQYTFEIQAVNGVTDQSPFSPQFASVNITTNQAAPSAVSIMHQVSRTVDSITLSWSQPDQPNGVILDYELQYYEKELSEYNATAIKSPTNTVTVQGLKAGAIYVFQVRARTVAGYGRYSGKMYFQTMTEAEYQTSIQEKLPLIIGSSAAGLVFLIAVVVIAIVCNRRGFERADSEYTDKLQHYTSGHMTPGMKIYIDPFTYEDPNEAVREFAKEIDISCVKIEQVIGAGEFGEVCSGHLKLPGKREIFVAIKTLKSGYTEKQRRDFLSEASIMGQFDHPNVIHLEGVVTKSTPVMIITEFMENGSLDSFLRQNDGQFTVIQLVGMLRGIAAGMKYLADMNYVHRDLAARNILVNSNLVCKVSDFGLSRFLEDDTSDPTYTSALGGKIPIRWTAPEAIQYRKFTSASDVWSYGIVMWEVMSYGERPYWDMTNQDVINAIEQDYRLPPPMDCPSALHQLMLDCWQKDRNHRPKFGQIVNTLDKMIRNPNSLKAMAPLSSGINLPLLDRTIPDYTSFNTVDEWLEAIKMGQYKESFANAGFTSFDVVSQMMMEDILRVGVTLAGHQKKILNSIQVMRAQMNQIQSVEV

SEQ ID NO: 96 - protein, 986 aa, Homo sapiens
MALRRLGAALLLLPLLAAVEETLMDSTTATAELGWMVHPPSGWEEVSGYDENMNTIRTYQVCNVFESSQNNWLRTKFIRRRGAHRIHVEMKFSVRDCRSIPSVPGSCKETFNLYYYEADFDSATKTFPNWMENPWVKVDTIAADESFSQVDLGGRVMKINTEVRSFGPVSRSGFYLAFQDYGGCMSLIAVRVFYRKCPRIIQNGAIFQETLSGAESTSLVAARGSCIANAEEVDVPIKLYCNGDGEWLVPIGRCMCKAGFEAVENGTVCRGCPSGTFKANQGDEACTHCPINSRTTSEGATNCVCRNGYYRADLDPLDMPCTTIPSAPQAVISSVNETSLMLEWTPPRDSGGREDLVYNIICKSCGSGRGACTRCGDNVQYAPRQLGLTEPRIYISDLLAHTQYTFEIQAVNGVTDQSPFSPQFASVNITTNQAAPSAVSIMHQVSRTVDSITLSWSQPDQPNGVILDYELQYYEKELSEYNATAIKSPTNTVTVQGLKAGAIYVFQVRARTVAGYGRYSGKMYFQTMTEAEYQTSIQEKLPLIIGSSAAGLVFLIAVVVIAIVCNRRGFERADSEYTDKLQHYTSGHMTPGMKIYIDPFTYEDPNEAVREFAKEIDISCVKIEQVIGAGEFGEVCSGHLKLPGKREIFVAIKTLKSGYTEKQRRDFLSEASIMGQFDHPNVIHLEGVVTKSTPVMIITEFMENGSLDSFLRQNDGQFTVIQLVGMLRGIAAGMKYLADMNYVHRDLAARNILVNSNLVCKVSDFGLSRFLEDDTSDPTYTSALGGKIPIRWTAPEAIQYRKFTSASDVWSYGIVMWEVMSYGERPYWDMTNQDVINAIEQDYRLPPPMDCPSALHQLMLDCWQKDRNHRPKFGQIVNTLDKMIRNPNSLKAMAPLSSGINLPLLDRTIPDYTSFNTVDEWLEAIKMGQYKESFANAGFTSFDVVSQMMMEDILRVGVTLAGHQKKILNSIQVMRAQMNQIQSVEV

SEQ ID NO: 97 - protein, 986 aa, Homo sapiens
MALRRLGAALLLLPLLAAVEETLMDSTTATAELGWMVHPPSGWEEVSGYDENMNTIRTYQVCNVFESSQNNWLRTKFIRRRGAHRIHVEMKFSVRDCSSIPSVPGSCKETFNLYYYEADFDSATKTFPNWMENPWMKVDTIAADESFSQVDLGGRVMKINTEVRSFGPVSRSGFYLAFQDYGGCMSLIAVRVFYRKCPRIIQNGAIFQETLSGAESTSLVAARGSCIANAEEVDVPIKLYCNGDGEWLVPIGRCMCKAGFEAVENGTVCRGCPSGTFKANQGDEACTHCPINSRTTSEGATNCVCRNGYYRADLDPLDMPCTTIPSAPQAVISSVNETSLMLEWTPPRDSGGREDLVYNIICKSCGSGRGACTRCGDNVQYAPRQLGLTEPRIYISDLLAHTQYTFEIQAVNGVTDQSPFSPQFASVNITTNQAAPSAVSIMHQVSRTVDSITLSWSQPDQPNGVILDYELQYYEKELSEYNATAIKSPTNTVTVQGLKAGAIYVFQVRARTVAGYGRYSGKMYFQTMTEAEYQTSIQEKLPLIIGSSAAGLVFLIAVVVIAIVCNRRGFERADSEYTDKLQHYTSGHMTPGMKIYIDPFTYEDPNEAVREFAKEIDISCVKIEQVIGAGEFGEVCSGHLKLPGKREIFVAIKTLKSGYTEKQRRDFLSEASIMGQFDHPNVIHLEGVVTKSTPVMIITEFMENGSLDSFLRQNDGQFTVIQLVGMLRGIAAGMKYLADMNYVHRDLAARNILVNSNLVCKVSDFGLSRFLEDDTSDPTYTSALGGKIPIRWTAPEAIQYRKFTSASDVWSYGIVMWEVMSYGERPYWDMTNQDVINAIEQDYRLPPPMDCPSALHQLMLDCWQKDRNHRPKFGQIVNTLDKMIRNPNSLKAMAPLSSGINLPLLDRTIPDYTSFNTVDEWLEAIKMGQYKESFANAGFTSFDVVSQMMMEDILRVGVTLAGHQKKILNSIQVMRAQMNQIQSVEV

SEQ ID NO: 98 - protein, 986 aa, Homo sapiens
MALRRLGAALLLLPLLAAVEETLMDSTTATAELGWMVHPPSGWEEVSGYDENMNTIRTYQVCNVFESSQNNWLRTKFIRRRGAHRIHVEMKFSVRDCSSIPSVPGSCKETFNLYYYEADFDSATKTFPNWMENPWVKVDTIAADESFSQVDLGGRVMKINTEVRSFGPVSRSGFYLAFQDYGGCMSLIAVRVFYRKCPRIIQNGAIFQETLSGAESTSLVAARGSCIANAEEVDVPIKLYCNGDGEWLVPIGRCMCKAGFEAVENGTVCQGCPSGTFKANQGDEACTHCPINSRTTSEGATNCVCRNGYYRADLDPLDMPCTTIPSAPQAVISSVNETSLMLEWTPPRDSGGREDLVYNIICKSCGSGRGACTRCGDNVQYAPRQLGLTEPRIYISDLLAHTQYTFEIQAVNGVTDQSPFSPQFASVNITTNQAAPSAVSIMHQVSRTVDSITLSWSQPDQPNGVILDYELQYYEKELSEYNATAIKSPTNTVTVQGLKAGAIYVFQVRARTVAGYGRYSGKMYFQTMTEAEYQTSIQEKLPLIIGSSAAGLVFLIAVVVIAIVCNRRGFERADSEYTDKLQHYTSGHMTPGMKIYIDPFTYEDPNEAVREFAKEIDISCVKIEQVIGAGEFGEVCSGHLKLPGKREIFVAIKTLKSGYTEKQRRDFLSEASIMGQFDHPNVIHLEGVVTKSTPVMIITEFMENGSLDSFLRQNDGQFTVIQLVGMLRGIAAGMKYLADMNYVHRDLAARNILVNSNLVCKVSDFGLSRFLEDDTSDPTYTSALGGKIPIRWTAPEAIQYRKFTSASDVWSYGIVMWEVMSYGERPYWDMTNQDVINAIEQDYRLPPPMDCPSALHQLMLDCWQKDRNHRPKFGQIVNTLDKMIRNPNSLKAMAPLSSGINLPLLDRTIPDYTSFNTVDEWLEAIKMGQYKESFANAGFTSFDVVSQMMMEDILRVGVTLAGHQKKILNSIQVMRAQMNQIQSVEV

SEQ ID NO: 99 - protein, 986 aa, Homo sapiens
MALRRLGAALLLLPLLAAVEETLMDSTTATAELGWMVHPPSGWEEVSGYDENMNTIRTYQVCNVFESSQNNWLRTKFIRRRGAHRIHVEMKFSVRDCSSIPSVPGSCKETFNLYYYEADFDSATKTFPNWMENPWVKVDTIAADESFSQVDLGGRVMKINTEVRSFGPVSRSGFYLAFQDYGGCMSLIAVRVFYRKCPRIIQNGAIFQETLSGAESTSLVAARGSCIANAEEVDVPIKLYCNGDGEWLVPIGRCMCKAGFEAVENGTVCRGCLSGTFKANQGDEACTHCPINSRTTSEGATNCVCRNGYYRADLDPLDMPCTTIPSAPQAVISSVNETSLMLEWTPPRDSGGREDLVYNIICKSCGSGRGACTRCGDNVQYAPRQLGLTEPRIYISDLLAHTQYTFEIQAVNGVTDQSPFSPQFASVNITTNQAAPSAVSIMHQVSRTVDSITLSWSQPDQPNGVILDYELQYYEKELSEYNATAIKSPTNTVTVQGLKAGAIYVFQVRARTVAGYGRYSGKMYFQTMTEAEYQTSIQEKLPLIIGSSAAGLVFLIAVVVIAIVCNRRGFERADSEYTDKLQHYTSGHMTPGMKIYIDPFTYEDPNEAVREFAKEIDISCVKIEQVIGAGEFGEVCSGHLKLPGKREIFVAIKTLKSGYTEKQRRDFLSEASIMGQFDHPNVIHLEGVVTKSTPVMIITEFMENGSLDSFLRQNDGQFTVIQLVGMLRGIAAGMKYLADMNYVHRDLAARNILVNSNLVCKVSDFGLSRFLEDDTSDPTYTSALGGKIPIRWTAPEAIQYRKFTSASDVWSYGIVMWEVMSYGERPYWDMTNQDVINAIEQDYRLPPPMDCPSALHQLMLDCWQKDRNHRPKFGQIVNTLDKMIRNPNSLKAMAPLSSGINLPLLDRTIPDYTSFNTVDEWLEAIKMGQYKESFANAGFTSFDVVSQMMMEDILRVGVTLAGHQKKILNSIQVMRAQMNQIQSVEV

SEQ ID NO: 100 - protein, 986 aa, Homo sapiens
MALRRLGAALLLLPLLAAVEETLMDSTTATAELGWMVHPPSGWEEVSGYDENMNTIRTYQVCNVFESSQNNWLRTKFIRRRGAHRIHVEMKFSVRDCSSIPSVPGSCKETFNLYYYEADFDSATKTFPNWMENPWVKVDTIAADESFSQVDLGGRVMKINTEVRSFGPVSRSGFYLAFQDYGGCMSLIAVRVFYRKCPRIIQNGAIFQETLSGAESTSLVAARGSCIANAEEVDVPIKLYCNGDGEWLVPIGRCMCKAGFEAVENGTVCRGCPSGTFKANQGDEACTHCPINSRTTSEGATNCVCRNGYYRADLDPLDMPCTTIPSAPQAVISSVNETSLMLEWTPPRDSGGREDLVYNIICKSCGSGQGACTRCGDNVQYAPRQLGLTEPRIYISDLLAHTQYTFEIQAVNGVTDQSPFSPQFASVNITTNQAAPSAVSIMHQVSRTVDSITLSWSQPDQPNGVILDYELQYYEKELSEYNATAIKSPTNTVTVQGLKAGAIYVFQVRARTVAGYGRYSGKMYFQTMTEAEYQTSIQEKLPLIIGSSAAGLVFLIAVVVIAIVCNRRGFERADSEYTDKLQHYTSGHMTPGMKIYIDPFTYEDPNEAVREFAKEIDISCVKIEQVIGAGEFGEVCSGHLKLPGKREIFVAIKTLKSGYTEKQRRDFLSEASIMGQFDHPNVIHLEGVVTKSTPVMIITEFMENGSLDSFLRQNDGQFTVIQLVGMLRGIAAGMKYLADMNYVHRDLAARNILVNSNLVCKVSDFGLSRFLEDDTSDPTYTSALGGKIPIRWTAPEAIQYRKFTSASDVWSYGIVMWEVMSYGERPYWDMTNQDVINAIEQDYRLPPPMDCPSALHQLMLDCWQKDRNHRPKFGQIVNTLDKMIRNPNSLKAMAPLSSGINLPLLDRTIPDYTSFNTVDEWLEAIKMGQYKESFANAGFTSFDVVSQMMMEDILRVGVTLAGHQKKILNSIQVMRAQMNQIQSVEV

SEQ ID NO: 101 - protein, 986 aa, Homo sapiens
MALRRLGAALLLLPLLAAVEETLMDSTTATAELGWMVHPPSGWEEVSGYDENMNTIRTYQVCNVFESSQNNWLRTKFIRRRGAHRIHVEMKFSVRDCSSIPSVPGSCKETFNLYYYEADFDSATKTFPNWMENPWVKVDTIAADESFSQVDLGGRVMKINTEVRSFGPVSRSGFYLAFQDYGGCMSLIAVRVFYRKCPRIIQNGAIFQETLSGAESTSLVAARGSCIANAEEVDVPIKLYCNGDGEWLVPIGRCMCKAGFEAVENGTVCRGCPSGTFKANQGDEACTHCPINSRTTSEGATNCVCRNGYYRADLDPLDMPCTTIPSAPQAVISSVNETSLMLEWTPPRDSGGREDLVYNIICKSCGSGRGACTRCGDNVQYAPRQLGLTEPRIYISDLLAHTQYTFEIQAVNGVTDQSPFSPQFASVNITTNQAAPSAVSIMHQVSRTVDSITLSWSQPDQPNGVILDYELQYYEKELSEYNATAIKSPTNTVTVQGLKAGAIYVFQVRARTVAGYGRYSGKMYFQTMTEAEYQTSIQEKLPLIIGSSAAGLVFLIAVVVIAIVCNRRGFERADSEYTDKLQHYTSGHMTPGMKIYIDPFTYEDPNEAVREFAKEIDISCVKIEQVIGAGEFGEVCSGHLKLPGKREIFVAIKTLKSGYTEKQRRDFLSEASIMGQFDHPNVIHLKGVVTKSTPVMIITEFMENGSLDSFLRQNDGQFTVIQLVGMLRGIAAGMKYLADMNYVHRDLAARNILVNSNLVCKVSDFGLSRFLEDDTSDPTYTSALGGKIPIRWTAPEAIQYRKFTSASDVWSYGIVMWEVMSYGERPYWDMTNQDVINAIEQDYRLPPPMDCPSALHQLMLDCWQKDRNHRPKFGQIVNTLDKMIRNPNSLKAMAPLSSGINLPLLDRTIPDYTSFNTVDEWLEAIKMGQYKESFANAGFTSFDVVSQMMMEDILRVGVTLAGHQKKILNSIQVMRAQMNQIQSVEV

SEQ ID NO: 102 - protein, 986 aa, Homo sapiens
MALRRLGAALLLLPLLAAVEETLMDSTTATAELGWMVHPPSGWEEVSGYDENMNTIRTYQVCNVFESSQNNWLRTKFIRRRGAHRIHVEMKFSVRDCSSIPSVPGSCKETFNLYYYEADFDSATKTFPNWMENPWVKVDTIAADESFSQVDLGGRVMKINTEVRSFGPVSRSGFYLAFQDYGGCMSLIAVRVFYRKCPRIIQNGAIFQETLSGAESTSLVAARGSCIANAEEVDVPIKLYCNGDGEWLVPIGRCMCKAGFEAVENGTVCRGCPSGTFKANQGDEACTHCPINSRTTSEGATNCVCRNGYYRADLDPLDMPCTTIPSAPQAVISSVNETSLMLEWTPPRDSGGREDLVYNIICKSCGSGRGACTRCGDNVQYAPRQLGLTEPRIYISDLLAHTQYTFEIQAVNGVTDQSPFSPQFASVNITTNQAAPSAVSIMHQVSRTVDSITLSWSQPDQPNGVILDYELQYYEKELSEYNATAIKSPTNTVTVQGLKAGAIYVFQVRARTVAGYGRYSGKMYFQTMTEAEYQTSIQEKLPLIIGSSAAGLVFLIAVVVIAIVCNRRGFERADSEYTDKLQHYTSGHMTPGMKIYIDPFTYEDPNEAVREFAKEIDISCVKIEQVIGAGEFGEVCSGHLKLPGKREIFVAIKTLKSGYTEKQRRDFLSEASIMGQFDHPNVIHLEGVVTKSTPVMIITEFMENGSLDSFLRQNDGQFTVIQLVGMLRGIAAGMKYLADMNYVHRDLAARNILVNSNLVCKLSDFGLSRFLEDDTSDPTYTSALGGKIPIRWTAPEAIQYRKFTSASDVWSYGIVMWEVMSYGERPYWDMTNQDVINAIEQDYRLPPPMDCPSALHQLMLDCWQKDRNHRPKFGQIVNTLDKMIRNPNSLKAMAPLSSGINLPLLDRTIPDYTSFNTVDEWLEAIKMGQYKESFANAGFTSFDVVSQMMMEDILRVGVTLAGHQKKILNSIQVMRAQMNQIQSVEV

SEQ ID NO: 103 - protein, 997 aa, Homo sapiens
MARARPPPPSPPPGLLPLLPPLLLLPLLLLPAGCRALEETLMDTKWVTSELAWTSHPESGWEEVSGYDEAMNPIRTYQVCNVRESSQNNWLRTGFIWRRDVQRVYVELKFTVRDCNSIPNIPGSCKETFNLFYYEADSDVASASSPFWMENPYVKVDTIAPDESFSRLDAGRVNTKVRSFGPLSKAGFYLAFQDQGACMSLISVRAFYKKCASTTAGFALFPETLTGAEPTSLVIAPGTCIPNAVEVSVPLKLYCNGDGEWMVPVGACTCATGHEPAAKESQCRPCPPGSYKAKQGEGPCLPCPPNSRTTSPAASICTCHNNFYRADSDSADSACTTVPSPPRGVISNVNETSLILEWSEPRDLGGRDDLLYNVICKKCHGAGGASACSRCDDNVEFVPRQLGLTERRVHISHLLAHTRYTFEVQAVNGVSGKSPLPPRYAAVNITTNQAAPSEVPTLRLHSSSGSSLTLSWAPPERPNGVILDYEMKYFEKSEGIASTVTSQMNSVQLDGLRPDARYVVQVRARTVAGYGQYSRPAEFETTSERGSGAQQLQEQLPLIVGSATAGLVFVVAVVVIAIVCLRKQRHGSDSEYTEKLQQYIAPGMKVYIDPFTYEDPNEAVREFAKEIDVSCVKIEEVIGAGEFGEVCRGRLKQPGRREVFVAIKTLKVGYTERQRRDFLSEASIMGQFDHPNIIRLEGVVTKSRPVMILTEFMENCALDSFLRLNDGQFTVIQLVGMLRGIAAGMKYLSEMNYVHRDLAARNILVNSNLVCKVSDFGLSRFLEDDPSDPTYTSSLGGKIPIRWTAPEAIAYRKFTSASDVWSYGIVMWEVMSYGERPYWDMSNQDVINAVEQDYRLPPPMDCPTALHQLMLDCWVRDRNLRPKFSQIVNTLDKLIRNAASLKVIASAQSGMSQPLLDRTVPDYTTFTTVGDWLDAIKMGRYKESFVSAGFASFDLVAQMTAEDLLRIGVTLAGHQKKILSSIQDMRLQMNQTLPVQV

SEQ ID NO: 104 - protein, 998 aa, Homo sapiens
MARARPPPPPSPPPGLLPLLPPLLLLPLLLLPAGCRALEETLMDTKWVTSELAWTSHPESGWEEVSGYDEAMNPIRTYQVCNVRESSQNNWLRTGFIWRRDVQRVYVELKFTVRDCNSIPNIPGSCKETFNLFYYEADSDVASASSPFWMENPYVKVDTIAPDESFSRLDAGRVNTKVRSFGPLSKAGFYLAFQDQGACMSLISVRAFYKKCASTTAGFALFPETLTGAEPTSLVIAPGTCIPNAVEVSVPLKLYCNGDGEWMVPVGACTCATGHEPAAKESQCRPCPPGSYKAKQGEGPCLPCPPNSRTTSPAASICTCHNNFYRADSDSADSACTTVPSPPRGVISNVNETSLILEWSEPRDLGGRDDLLYNVICKKCHGAGGASACSRCDDNVEFVPRQLGLTERRVHISHLLAHTRYTFEVQAVNGVSGKSPLPPRYAAVNITTNQAAPSEVPTLRLHSSSGSSLTLSWAPPERPNGVILDYEMKYFEKSEGIASTVTSQMNSVQLDGLRPDVRYVVQVRARTVAGYGQYSRPAEFETTSERGSGAQQLQEQLPLIVGSATAGLVFVVAVVVIAIVCLRKQRHGSDSEYTEKLQQYIAPGMKVYIDPFTYEDPNEAVREFAKEIDVSCVKIEEVIGAGEFGEVCRGRLKQPGRREVFVAIKTLKVGYTERQRRDFLSEASIMGQFDHPNIIRLEGVVTKSRPVMILTEFMENCALDSFLRLNDGQFTVIQLVGMLRGIAAGMKYLSEMNYVHRDLAARNILVNSNLVCKVSDFGLSRFLEDDPSDPTYTSSLGGKIPIRWTAPEAIAYRKFTSASDVWSYGIVMWEVMSYGERPYWDMSNQDVINAVEQDYRLPPPMDCPTALHQLMLDCWVRDRNLRPKFSQIVNTLDKLIRNAASLKVIASAQSGMSQPLLDRTVPDYTTFTTVGDWLDAIKMGRYKESFVSAGFASFDLVAQMTAEDLLRIGVTLAGHQKKILSSIQDMRLQMNQTLPVQV

SEQ ID NO: 105 - protein, 987 aa, Homo sapiens
MELRVLLCWASLAAALEETLLNTKLETADLKWVTFPQVDGQWEELSGLDEEQHSVRTYEVCDVQRAPGQAHWLRTGWVPRRGAVHVYATLRFTMLECLSLPRAGRSCKETFTVFYYESDADTATALTPAWMENPYIKVDTVAAEHLTRKRPGAEATGKVNVKTLRLGPLSKAGFYLAFQDQGACMALLSLHLFYKKCAQLTVNLTRFPETVPRELVVPVAGSCVVDAVPASGPSPSLYCREDGQWAEQPVTGCSCAPGFEAAEGNTKCRACAQGTFKPLSGEGSCQPCPANSHSNTIGSAVCQCRVGYFRARTDPRGAPCTTPPSAPRSVVSRLNGSSLHLEWSAPLESGGREDLTYALRCRECRPGGSCAPCGGDLTFDPGPRDLVEPWVVVRGLRPDFTYTFEVTALNGVSSLATGPVPFEPVNVTTDREVPPAVSDIRVTRSSPSSLSLAWAVPRAPSGAVLDYEVKYHEKGAEGPSSVRFLKTSENRAELRGLKRGASYLVQVRARSEAGYGPFGQEHHSQTQLDESEGWREQLALIAGTAVVGVVLVLVVIVVAVLCLRKQSNGREAEYSDKHGQYLIGHGTKVYIDPFTYEDPNEAVREFAKEIDVSYVKIEEVIGAGEFGEVCRGRLKAPGKKESCVAIKTLKGGYTERQRREFLSEASIMGQFEHPNIIRLEGVVTNSMPVMILTEFMENGALDSFLRLNDGQFTVIQLVGMLRGIASGMRYLAEMSYVHRDLAARNILVNSNLVCKVSDFGLSRFLEENSSDPTYTSSLGGKIPIRWTAPEAIAFRKFTSASDAWSYGIVMWEVMSFGERPYWDMSNQDVINAIEQDYRLPPPPDCPTSLHQLMLDCWQKDRNARPRFPQVVSALDKMIRNPASLKIVARENGGASHPLLDQRQPHYSAFGSVGEWLRAIKMGRYEESFAAAGFGSFELVSQISAEDLLRIGVTLAGHQKKILASVQHMKSQAKPGTPGGTGGPAPQY

SEQ ID NO: 106 - protein, 987 aa, Homo sapiens
MELRVLLCWASLAAALEETLLNTKLETADLKWVTFPQVDGQWEELSGLDEEQHSVRTYEVCDVQRAPGQAHWLRTGWVPRRGAVHVYATLRFTMLECLSLPRAGRSCKETFTVFYYESDADTATALTPAWMENPYIKVDTVAAEHLTRKRPGAEATGKVNVKTLRLGPLSKAGFYLAFQDQGACMALLSLHLFYKKCAQLTVNLTRFPETVPRELVVPVAGSCVVDAVPAPGPSPSLYCREDGQWAEQPVTGCSCAPGFEAAEGNTKCRACAQGTFKPLSGEGSCQPCPANSHSNTIGSAVCQCRVGYFRARTDPRGAPCTTPPSAPRSVVSRLNGSSLHLEWSAPLESGGREDLTYALRCRECRPGGSCAPCGGDLTFDPGPRDLVEPWVVVRGLRPDFTYTFEVTALNGVSSLATGPVPFEPVNVTTDREVPPAVSDIRVTRSSPSSLSLAWAVPRAPSGAVLDYEVKYHEKGAEGPSSVRFLKTSENRAELRGLKRGASYLVQVRARSEAGYGPFGQEHHSQTQLDESEGWREQLALIAGTAVMGVVLVLVVIVVAVLCLRKQSNGREAEYSDKHGQYLIGHGTKVYIDPFTYEDPNEAVREFAKEIDVSYVKIEEVIGAGEFGEVCRGRLKAPGKKESCVAIKTLKGGYTERQRREFLSEASIMGQFEHPNIIRLEGVVTNSMPVMILTEFMENGALDSFLRLNDGQFTVIQLVGMLRGIASGMRYLAEMSYVHRDLAARNILVNSNLVCKVSDFGLSRFLEENSSDPTYTSSLGGKIPIRWTAPEAIAFRKFTSASDAWSYGIVMWEVMSFGERPYWDMSNQDVINAIEQDYRLPPPPDCPTSLHQLMLDCWQKDRNARPRFPQVVSALDKMIRNPASLKIVARENGGASHPLLDQRQPHYSAFGSVGEWLRAIKMGRYEESFAAAGFGSFELVSQISAEDLLRIGVTLAGHQKKILASVQHMKSQAKPGTPGGTGGPAPQY

SEQ ID NO: 107 - protein, 987 aa, Homo sapiens
MELRVLLCWASLAAALEETLLNTKLETADLKWVTFPQVDGQWEELSGLDEEQHSVRTYEVCDVQRAPGQAHWLRTGWVPRRGAVHVYATLRFTMLECLSLPRAGRSCKETFTVFYYESDADTATALTPAWMENPYIKVDTVAAEHLTRKRPGAEATGKVNVKTLRLGPLSKAGFYLAFQDQGACMALLSLHLFYKKCAQLTVNLTRFPETVPRELVVPVAGSCVVDAVPAPGPSPSLYCREDGQWAEQPVTGCSCAPGFEAAEGNTKCRACAQGTFKPLSGEGSCQPCPANSHSNTIGSAVCQCRVGYFRARTDPRGAPCTTPPSAPRSVVSRLNGSSLHLEWSAPLESGGREDLTYALRCRECRPGGSCAPCGGDLTFDPGPRDLVEPWVVVRGLRPDFTYTFEVTALNGVSSLATGPVPFEPVNVTTDREVPPAVSDIRVTRSSPSSLSLAWAVPRAPSGAVLDYEVKYHEKGAEGPSSVRFLKTSENRAELRGLKRGASYLVQVRARSEAGYGPFGQEHHSQTQLDESEGWREQLALIAGTAVVGVVLVLVVIVVAVLCLRKQSNGREAEYSGKHGQYLIGHGTKVYIDPFTYEDPNEAVREFAKEIDVSYVKIEEVIGAGEFGEVCRGRLKAPGKKESCVAIKTLKGGYTERQRREFLSEASIMGQFEHPNIIRLEGVVTNSMPVMILTEFMENGALDSFLRLNDGQFTVIQLVGMLRGIASGMRYLAEMSYVHRDLAARNILVNSNLVCKVSDFGLSRFLEENSSDPTYTSSLGGKIPIRWTAPEAIAFRKFTSASDAWSYGIVMWEVMSFGERPYWDMSNQDVINAIEQDYRLPPPPDCPTSLHQLMLDCWQKDRNARPRFPQVVSALDKMIRNPASLKIVARENGGASHPLLDQRQPHYSAFGSVGEWLRAIKMGRYEESFAAAGFGSFELVSQISAEDLLRIGVTLAGHQKKILASVQHMKSQAKPGTPGGTGGPAPQY

SEQ ID NO: 108 - protein, 987 aa, Homo sapiens
MELRVLLCWASLAAALEETLLNTKLETADLKWVTFPQVDGQWEELSGLDEEQHSVRTYEVCDVQRAPGQAHWLRTGWVPRRGAVHVYATLRFTMLECLSLPRAGRSCKETFTVFYYESDADTATALTPAWMENPYIKVDTVAAEHLTRKRPGAEATGKVNVKTLRLGPLSKAGFYLAFQDQGACMALLSLHLFYKKCAQLTVNLTRFPETVPRELVVPVAGSCVVDAVPAPGPSPSLYCREDGQWAEQPVTGCSCAPGFEAAEGNTKCRACAQGTFKPLSGEGSCQPCPANSHSNTIGSAVCQCRVGYFRARTDPRGAPCTTPPSAPRSVVSRLNGSSLHLEWSAPLESGGREDLTYALRCRECRPGGSCAPCGGDLTFDPGPRDLVEPWVVVRGLRPDFTYTFEVTALNGVSSLATGPVPFEPVNVTTDREVPPAVSDIRVTRSSPSSLSLAWAVPRAPSGAVLDYEVKYHEKGAEGPSSVRFLKTSENRAELRGLKRGASYLVQVRARSEAGYGPFGQEHHSQTQLDESEGWREQLALIAGTAVVGVVLVLVVIVVAVLCLRKQSNGREAEYSDKHGQYLIGHGTKVYIDPFTYEDPNEAVREFAKETDVSYVKIEEVIGAGEFGEVCRGRLKAPGKKESCVAIKTLKGGYTERQRREFLSEASIMGQFEHPNIIRLEGVVTNSMPVMILTEFMENGALDSFLRLNDGQFTVIQLVGMLRGIASGMRYLAEMSYVHRDLAARNILVNSNLVCKVSDFGLSRFLEENSSDPTYTSSLGGKIPIRWTAPEAIAFRKFTSASDAWSYGIVMWEVMSFGERPYWDMSNQDVINAIEQDYRLPPPPDCPTSLHQLMLDCWQKDRNARPRFPQVVSALDKMIRNPASLKIVARENGGASHPLLDQRQPHYSAFGSVGEWLRAIKMGRYEESFAAAGFGSFELVSQISAEDLLRIGVTLAGHQKKILASVQHMKSQAKPGTPGGTGGPAPQY

SEQ ID NO: 109 - protein, 987 aa, Homo sapiens [sequence omitted]

SEQ ID NO: 110 - protein, 987 aa, Homo sapiens
MELRVLLCWASLAAALEETLLNTKLETADLKWVTFPQVDGQWEELSGLDEEQHSVRTYEVCDVQRAPGQAHWLRTGWVPRRGAVHVYATLRFTMLECLSLPRAGRSCKETFTVFYYESDADTATALTPAWMENPYIKVDTVAAEHLTRKRPGAEATGKVNVKTLRLGPLSKAGFYLAFQDQGACMALLSLHLFYKKCAQLTVNLTRFPETVPRELVVPVAGSCVVDAVPAPGPSPSLYCREDGQWAEQPVTGCSCAPGFEAAEGNTKCRACAQGTFKPLSGEGSCQPCPANSHSNTIGSAVCQCRVGYFRARTDPRGAPCTTPPSAPRSVVSRLNGSSLHLEWSAPLESGGREDLTYALRCRECRPGGSCAPCGGDLTFDPGPRDLVEPWVVVRGLRPDFTYTFEVTALNGVSSLATGPVPFEPVNVTTDREVPPAVSDIRVTRSSPSSLSLAWAVPRAPSGAVLDYEVKYHEKGAEGPSSVRFLKTSENRAELRGLKRGASYLVQVRARSEAGYGPFGQEHHSQTQLDESEGWREQLALIAGTAVVGVVLVLVVIVVAVLCLRKQSNGREAEYSDKHGQYLIGHGTKVYIDPFTYEDPNEAVREFAKEIDVSYVKIEEVIGAGEFGEVCRGRLKAPGKKESCVAIKTLKGGYTERQRREFLSEASIMGQFEHPNIIRLEGVVTNSMPVMILTEFMENGALDSFLRLNDGQFTVIQLVGMLRGIASGMRYLAEMSYVHRDLAARNILVNSNLVCKVSDFGLSRFLEENSSDPTYTSSLGGKIPIRWTAPEAIAFRKFTSASDAWSYGIVMWEVMSFGERPYWDMSNQDVINAIEQDYRLPPPPDCPTSLHQLMLDCWQKDRNARPRFPQVVSALDKMIRNPASLKIVARENGGASHPLLDQRQPHYSAFGSVGEWLRAIKMGRYEESFAAAGFGSFELVSQISAEDLLRIGVTLVGHQKKILASVQHMKSQAKPGTPGGTGGPAPQY

SEQ ID NO: 111 - protein, 887 aa, Homo sapiens
MVCSLWVLLLVSSVLALEEVLLDTTGETSEIGWLTYPPGGWDEVSVLDDQRRLTRTFEACHVAGAPPGTGQDNWLQTHFVERRGAQRAHIRLHFSVRACSSLGVSGGTCRETFTLYYRQAEEPDSPDSVSSWHLKRWTKVDTIAADESFPSSSSSSSSSSSAAWAVGPHGAGQRAGLQLNVKERSFGPLTQRGFYVAFQDTGACLALVAVRLFSYTCPAVLRSFASFPETQASGAGGASLVAAVGTCVAHAEPEEDGVGGQAGGSPPRLHCNGEGKWMVAVGGCRCQPGYQPARGDKACQACPRGLYKSSAGNAPCSPCPARSHAPNPAAPVCPCLEGFYRASSDPPEAPCTVPSAVPVVHQVSRASNSITVSWPQPDQTNGNILDYQLRYYDQAEDESHSFTLTSETNTATVTQLSPGHIYGFQVRARTAAGHGPYGGKVYFQTLPQGELSSQLPERLSLVIGSILGALAFLLLAAITVLAVVFQRKRRGTGYTEQLQQYSSPGLGVKYYIDPSTYEDPCQAIRELAREVDPAYIKIEEVIGTGSFGEVRQGRLQPRGRREQTVAIQALWAGGAESLQMTFLGRAAVLGQFQHPNILRLEGVVTKSRPLMVLTEFMELGPLDSFLRQREGQFSSLQLVAMQRGVAAAMQYLSSFAFVHRSLSAHSVLVNSHLVCKVARLGHSPQGPSCLLRWAAPEVIAHGKHTTSSDVWSFGILMWEVMSYGERPYWDMSEQEVLNAIEQEFRLPPPPGCPPGLHLLMLDTWQKDRARRPHFDQLVAAFDKMIRKPDTLQAGGDPGERPSQALLTPVALDFPCLDSPQAWLSAIGLECYQDNFSKFGLCTFSDVAQLSLEDLPALGITLAGHQKKLLHHIQLLQQHLRQQGSVEV

SEQ ID NO: 112 - protein, 1006 aa, Homo sapiens
MVCSLWVLLLVSSVLALEEVLLDTTGETSEIGWLTYPPGGWDEVSVLDDQRRLTRTFEACHVAGAPPGTGQDNWLQTHFVERRGAQRAHIRLHFSVRACSSLGVSGGTCRETFTLYYRQAEEPDSPDSVSSWHLKRWTKVDTIAADESFPSSSSSSSSSSSAAWAVGPHGAGQRAGLQLNVKERSFGPLTQRGFYVAFQDTGACLALVAVRLFSYTCPAVLRSFASFPETQASGAGGASLVAAVGTCVAHAEPEEDGVGGQAGGSPPRLHCNGEGKWMVAVGGCRCQPGYQPARGDKACQACPRGLYKSSAGNAPCSPCPARSHAPNPAAPVCPCLEGFYRASSDPPEAPCTGPPSAPQELWFEVQGSTLMLHWRLPRELGGRGDLLFNVVCKECEGRQEPASGGGGTCHRCRDEVHFDPRQRGLTESRVLVGGLRAHVPYILEVQAVNGVSELSPDPPQAAAINVSTSHEVPSAVPVVHQVSRASNSITVSWPQPDQTNGNILDYQLRYYDQAEDESHSFTLTSETNTATVTQLSPGHIYGFQVRARTAAGHGPYGGKVYFQTLPQGELSSQLPERLSLVIGSILGALAFLLLAAITVLAVVFQRKRRGTGYTEQLQQYSSPGLGVKYYIDPSTYEDPCQAIRELAREVDPAYIKIEEVIGTGSFGEVRQGRLQPRGRREQTVAIQALWAGGAESLQMTFLGRAAVLGQFQHPNILRLEGVVTKSRPLMVLTEFMELGPLDSFLRQREGQFSSLQLVAMQRGVAAAMQYLSSFAFVHRSLSAHSVLVNSHLVCKVARLGHSPQGPSCLLRWAAPEVIAHGKHTTSSDVWSFGILMWEVMSYGERPYWDMSEQEVLNAIEQEFRLPPPPGCPPGLHLLMLDTWQKDRARRPHFDQLVAAFDKMIRKPDTLQAGGDPGERPSQALLTPVALDFPCLDSPQAWLSAIGLECYQDNFSKFGLCTFSDVAQLSLEDLPALGITLAGHQKKLLHHIQLLQQHLRQQGSVEV

SEQ ID NO: 113 - protein, 1006 aa, Homo sapiens
MVCSLWVLLLVSSVLALEEVLLDTTGETSEIGWLTYPPGGWDEVSVLDDQRRLTRTFEACHVAGAPPGTGQDNWLQTHFVERRGAQRAHIRLHFSVRACSSLGVSGGTCRETFTLYYRQAEEPDSPDSVSSWHLKRWTKVDTIAADESFPSSSSSSSSSSSAAWAVGPHGAGQRAGLQLNVKERSFGPLTQRGFYVAFQDTGACLALVAVRLFSYTCPAVLRSFASFPETQASGAGGASLVAAVGTCVAHAEPEEDGVGGQAGGSPPRLHCNGEGKWMVAVGGCRCQPGYQPARGDKACQACPRGLYKSSAGNAPCSPCPARSHAPNPAAPVCPCLEGFYRASSDPPEAPCTGPPSAPQELWFEVQGSALMLHWRLPRELGGRGDLLFNVVCKECEGRQEPASGGGGTCHRCRDEVHFDPRQRGLTESRVLVGGLRAHVPYILEVQAVNGVSELSPDPPQAAAINVSTSHEVPSAVPVVHQVSRASNSITVSWPQPDQTNGNILDYQLRYYDQAEDESHSFTLTSETNTATVTQLSPGHIYGFQVRARTAAGHGPYGGKVYFQTLPQGELSSQLPERLSFVIGSILGALAFLLLAAITVLAVVFQRKRRGTGYTEQLQQYSSPGLGVKYYIDPSTYEDPCQAIRELAREVDPAYIKIEEVIGTGSFGEVRQGRLQPRGRREQTVAIQALWAGGAESLQMTFLGRAAVLGQFQHPNILRLEGVVTKSRPLMVLTEFMELGPLDSFLRQREGQFSSLQLVAMQRGVAAAMQYLSSFAFVHRSLSAHSVLVNSHLVCKVARLGHSPQGPSCLLRWAAPEVIAHGKHTTSSDVWSFGILMWEVMSYGERPYWDMSEQEVLNAIEQEFRLPPPPGCPPGLHLLMLDTWQKDRARRPHFDQLVAAFDKMIRKPDTLQAGGDPGERPSQALLTPVALDFPCLDSPQAWLSAIGLECYQDNFSKFGLCTFSDVAQLSLEDLPALGITLAGHQKKLLHHIQLLQQHLRQQGSVEV

SEQ ID NO: 114 - protein, 1006 aa, Homo sapiens
MVCSLWVLLLVSSVLALEEVLLDTTGETSEIGWLTYPPGGWDEVSVLDDQRRLTRTFEACHVAGAPPGTGQDNWLQTHFVERRGAQRAHIRLHFSVRACSSLGVSGGTCRETFTLYYRQAEEPDSPDSVSSWHLKRWTKVDTIAADESFPSSSSSSSSSSSAAWAVGPHGAGQRAGLQLNVKERSFGPLTQRGFYVAFQDTGACLALVAVRLFSYTCPAVLRSFASFPETQASGAGGASLVAAVGTCVAHAEPEEDGVGGQAGGSPPRLHCNGEGKWMVAVGGCRCQPGYQPARGDKACQACPRGLYKSSAGNAPCSPCPARSHAPNPAAPVCPCLEGFYRASSDPPEAPCTGPPSAPQELWFEVQGSALMLHWRLPRELGGRGDLLFNVVCKECEGRQEPASGGGGTCHRCRDEVHFDPRQRGLTESRVLVGGLRAHVPYILEVQAVNGVSELSPDPPQAAAINVSTSHEVPSAVPVVHQVSRASNSITVSWPQPDQTNGNILDYQLRYYDQAEDESHSFTLTSETNTATVTQLSPGHIYGFQVRARTAAGHGPYGGKVYFQTLPQGELSSQLPERLSLVIGSILGALAFLLLAAITVLAVVFQRKRRGTGYTKQLQQYSSPGLGVKYYIDPSTYEDPCQAIRELAREVDPAYIKIEEVIGTGSFGEVRQGRLQPRGRREQTVAIQALWAGGAESLQMTFLGRAAVLGQFQHPNILRLEGVVTKSRPLMVLTEFMELGPLDSFLRQREGQFSSLQLVAMQRGVAAAMQYLSSFAFVHRSLSAHSVLVNSHLVCKVARLGHSPQGPSCLLRWAAPEVIAHGKHTTSSDVWSFGILMWEVMSYGERPYWDMSEQEVLNAIEQEFRLPPPPGCPPGLHLLMLDTWQKDRARRPHFDQLVAAFDKMIRKPDTLQAGGDPGERPSQALLTPVALDFPCLDSPQAWLSAIGLECYQDNFSKFGLCTFSDVAQLSLEDLPALGITLAGHQKKLLHHIQLLQQHLRQQGSVEV

SEQ ID NO: 115 - protein, 1006 aa, Homo sapiens
MVCSLWVLLLVSSVLALEEVLLDTTGETSEIGWLTYPPGGWDEVSVLDDQRRLTRTFEACHVAGAPPGTGQDNWLQTHFVERRGAQRAHIRLHFSVRACSSLGVSGGTCRETFTLYYRQAEEPDSPDSVSSWHLKRWTKVDTIAADESFPSSSSSSSSSSSAAWAVGPHGAGQRAGLQLNVKERSFGPLTQRGFYVAFQDTGACLALVAVRLFSYTCPAVLRSFASFPETQASGAGGASLVAAVGTCVAHAEPEEDGVGGQAGGSPPRLHCNGEGKWMVAVGGCRCQPGYQPARGDKACQACPRGLYKSSAGNAPCSPCPARSHAPNPAAPVCPCLEGFYRASSDPPEAPCTGPPSAPQELWFEVQGSALMLHWRLPRELGGRGDLLFNVVCKECEGRQEPASGGGGTCHRCRDEVHFDPRQRGLTESRVLVGGLRAHVPYILEVQAVNGVSELSPDPPQAAAINVSTSHEVPSAVPVVHQVSRASNSITVSWPQPDQTNGNILDYQLRYYDQAEDESHSFTLTSETNTATVTQLSPGHIYGFQVRARTAAGHGPYGGKVYFQTLPQGELSSQLPERLSLVIGSILGALAFLLLAAITVLAVVFQRKRRGTGYTEQLQQYSSPGLGVKYYIDPSTYEDPCQAIRELVREVDPAYIKIEEVIGTGSFGEVRQGRLQPRGRREQTVAIQALWAGGAESLQMTFLGRAAVLGQFQHPNILRLEGVVTKSRPLMVLTEFMELGPLDSFLRQREGQFSSLQLVAMQRGVAAAMQYLSSFAFVHRSLSAHSVLVNSHLVCKVARLGHSPQGPSCLLRWAAPEVIAHGKHTTSSDVWSFGILMWEVMSYGERPYWDMSEQEVLNAIEQEFRLPPPPGCPPGLHLLMLDTWQKDRARRPHFDQLVAAFDKMIRKPDTLQAGGDPGERPSQALLTPVALDFPCLDSPQAWLSAIGLECYQDNFSKFGLCTFSDVAQLSLEDLPALGITLAGHQKKLLHHIQLLQQHLRQQGSVEV

SEQ ID NO: 116 - protein, 1006 aa, Homo sapiens
MVCSLWVLLLVSSVLALEEVLLDTTGETSEIGWLTYPPGGWDEVSVLDDQRRLTRTFEACHVAGAPPGTGQDNWLQTHFVERRGAQRAHIRLHFSVRACSSLGVSGGTCRETFTLYYRQAEEPDSPDSVSSWHLKRWTKVDTIAADESFPSSSSSSSSSSSAAWAVGPHGAGQRAGLQLNVKERSFGPLTQRGFYVAFQDTGACLALVAVRLFSYTCPAVLRSFASFPETQASGAGGASLVAAVGTCVAHAEPEEDGVGGQAGGSPPRLHCNGEGKWMVAVGGCRCQPGYQPARGDKACQACPRGLYKSSAGNAPCSPCPARSHAPNPAAPVCPCLEGFYRASSDPPEAPCTGPPSAPQELWFEVQGSALMLHWRLPRELGGRGDLLFNVVCKECEGRQEPASGGGGTCHRCRDEVHFDPRQRGLTESRVLVGGLRAHVPYILEVQAVNGVSELSPDPPQAAAINVSTSHEVPSAVPVVHQVSRASNSITVSWPQPDQTNGNILDYQLRYYDQAEDESHSFTLTSETNTATVTQLSPGHIYGFQVRARTAAGHGPYGGKVYFQTLPQGELSSQLPERLSLVIGSILGALAFLLLAAITVLAVVFQRKRRGTGYTEQLQQYSSPGLGVKYYIDPSTYEDPCQAIRELAREVDPAYIKIEEVIGTGSFGEVRQGRLQPRGRREQTVAIQALWAGGAESLQMTFLGRAAVLGQFQHPNILRLEGVVTKSRPLMVLTEFMELGPLDSFLRQREGQFSSLQLVAMQRGVAAAMQYLSSFAFVHRSLSAHRVLVNSHLVCKVARLGHSPQGPSCLLRWAAPEVIAHGKHTTSSDVWSFGILMWEVMSYGERPYWDMSEQEVLNAIEQEFRLPPPPGCPPGLHLLMLDTWQKDRARRPHFDQLVAAFDKMIRKPDTLQAGGDPGERPSQALLTPVALDFPCLDSPQAWLSAIGLECYQDNFSKFGLCTFSDVAQLSLEDLPALGITLAGHQKKLLHHIQLLQQHLRQQGSVEV

SEQ ID NO: 117 - protein, 1006 aa, Homo sapiens
MVCSLWVLLLVSSVLALEEVLLDTTGETSEIGWLTYPPGGWDEVSVLDDQRRLTRTFEACHVAGAPPGTGQDNWLQTHFVERRGAQRAHIRLHFSVRACSSLGVSGGTCRETFTLYYRQAEEPDSPDSVSSWHLKRWTKVDTIAADESFPSSSSSSSSSSSAAWAVGPHGAGQRAGLQLNVKERSFGPLTQRGFYVAFQDTGACLALVAVRLFSYTCPAVLRSFASFPETQASGAGGASLVAAVGTCVAHAEPEEDGVGGQAGGSPPRLHCNGEGKWMVAVGGCRCQPGYQPARGDKACQACPRGLYKSSAGNAPCSPCPARSHAPNPAAPVCPCLEGFYRASSDPPEAPCTGPPSAPQELWFEVQGSALMLHWRLPRELGGRGDLLFNVVCKECEGRQEPASGGGGTCHRCRDEVHFDPRQRGLTESRVLVGGLRAHVPYILEVQAVNGVSELSPDPPQAAAINVSTSHEVPSAVPVVHQVSRASNSITVSWPQPDQTNGNILDYQLRYYDQAEDESHSFTLTSETNTATVTQLSPGHIYGFQVRARTAAGHGPYGGKVYFQTLPQGELSSQLPERLSLVIGSILGALAFLLLAAITVLAVVFQRKRRGTGYTEQLQQYSSPGLGVKYYIDPSTYEDPCQAIRELAREVDPAYIKIEEVIGTGSFGEVRQGRLQPRGRREQTVAIQALWAGGAESLQMTFLGRAAVLGQFQHPNILRLEGVVTKSRPLMVLTEFMELGPLDSFLRQREGQFSSLQLVAMQRGVAAAMQYLSSFAFVHRSLSAHSVLVNSHLVCKVARLGHSPQGPSCLLCWAAPEVIAHGKHTTSSDVWSFGILMWEVMSYGERPYWDMSEQEVLNAIEQEFRLPPPPGCPPGLHLLMLDTWQKDRARRPHFDQLVAAFDKMIRKPDTLQAGGDPGERPSQALLTPVALDFPCLDSPQAWLSAIGLECYQDNFSKFGLCTFSDVAQLSLEDLPALGITLAGHQKKLLHHIQLLQQHLRQQGSVEV

SEQ ID NO: 118 - protein, 1074 aa, Homo sapiens
MISADCNLCLPEYDRYLASSKIMAAAYLDPNLNHTPNSSTKTHLGTGMERSPGAMERVLKVFHYFESNSEPTTWASIIRHGDATDVRGIIQKIVDSHKVKHVACYGFRLSHLRSEEVHWLHVDMGVSSVREKYELAHPPEEWKYELRIRYLPKGFLNQFTEDKPTLNFFYQQVKSDYMLEIADQVDQEIALKLGCLEIRRSYWEMRGNALEKKSNYEVLEKDVGLKRFFPKSLLDSVKAKTLRKLIQQTFRQFANLNREESILKFFEILSPVYRFDKECFKCALGSSWIISVELAIGPEEGISYLTDKGCNPTHLADFTQVQTIQYSNIEDKDRKGMLQLKIAGAPEPLTVTAPSLTIAENMADLIDGYCRLVNGTSQSFIIRPQKEGERALPSIPKLANSEKQGMRTHAVSVSETDDYAEIIDEEDTYTMPSTRDYEIQRERIELGRCIGEGQFGDVHQGIYMSPENPALAVAIKTCKNCTSDSVREKFLQEALTMRQFDHPHIVKLIGVITENPVWIIMELCTLGELRSFLQVRKYSLDLASLILYAYQLSTALAYLESKRFVHRDIAARNVLVSSNDCVKLGDFGLSRYMEDSTYYKASKGKLPIKWMAPESINFRRFTSASDVWMFGVCMWEILMHGVKPFQGVKNNDVIGRIENGERLPMPPNCPPTLYSLMTKCWAYDPSRRPRFTELKAQLSTILEEEKAQQEERMRMESRRQATVSWDSGGSDEAPPKPSRPGYPSPRSSEGFYPSPQHMVQTNHYQVSGYPGSHGITAMAGSIYPGQASLLDQTDSWNHRPQEIAMWQPNVEDSTVLDLRGIGQVLPTHLMEERLIRQQQEMEEDQRWLEKEERFLKPDVRLSRGSIDREDGSLQGPIGNQHIYQPVGKPDPAAPPKKPPRPGAPGHLGSLASLSSPADSYNEGVKLQPQEISPPPTANLDRSNDKVYENVTGLVKAVIEMSSKIQPAPPEEYVPMVKEVGLALRTLLATVDETIPLLPASTHREIEMAQKLLNSDLGELINKMKLAQQYVMTSLQQEYKKQMLTAAHALAVDAKNLLDVIDQARLKMLGQTRPH

SEQ ID NO: 119 - protein, 1074 aa, Homo sapiens
MISADCNLCLPEYDRYLASSKIMAAAYLDPNLNHTPNSSTKTHLGTGMERSPGAMERVLKVFHYFESNSEPTTWASIIRHGDATDVRGIIQKIVDSHKVKHVACYGFRLSHLRSEEVHWLHVDMGVSSVREKYELAHPPEEWKYELRIRYLPKGFLNQFTEDKPTLNFFYQQVKSDYMLEIADQVDQEIALKLGCLEIRRSYWEMRGNALEKKSNYEVLEKDVGLKRFFPKSLLDSVKAKTLRKLIQQTFRQFANLNREESILKFFEILSPVYRFDKECFKCALGSSWIISVELAIGPEEGISYLTDKGCNPTHLADFTQVQTIQYSNSEDKDRKGMLQLKIAGAPEPLTVTAPSLTIAENMADLIDGYCRLVNGTSQSFIIRPQKEGERALPSIPKLANSEKQGMRTHAVSVSETDDYAEIIDEEDTYTMPSTRDYEIRRERIELGRCIGEGQFGDVHQGIYMSPENPALAVAIKTCKNCTSDSVREKFLQEALTMRQFDHPHIVKLIGVITENPVWIIMELCTLGELRSFLQVRKYSLDLASLILYAYQLSTALAYLESKRFVHRDIAARNVLVSSNDCVKLGDFGLSRYMEDSTYYKASKGKLPIKWMAPESINFRRFTSASDVWMFGVCMWEILMHGVKPFQGVKNNDVIGRIENGERLPMPPNCPPTLYSLMTKCWAYDPSRRPRFTELKAQLSTILEEEKAQQEERMRMESRRQATVSWDSGGSDEAPPKPSRPGYPSPRSSEGFYPSPQHMVQTNHYQVSGYPGSHGITAMAGSIYPGQASLLDQTDSWNHRPQEIAMWQPNVEDSTVLDLRGIGQVLPTHLMEERLIRQQQEMEEDQRWLEKEERFLKPDVRLSRGSIDREDGSLQGPIGNQHIYQPVGKPDPAAPPKKPPRPGAPGHLGSLASLSSPADSYNEGVKLQPQEISPPPTANLDRSNDKVYENVTGLVKAVIEMSSKIQPAPPEEYVPMVKEVGLALRTLLATVDETIPLLPASTHREIEMAQKLLNSDLGELINKMKLAQQYVMTSLQQEYKKQMLTAAHALAVDAKNLLDVIDQARLKMLGQTRPH

SEQ ID NO: 120 - protein, 1074 aa, Homo sapiens
MISADCNLCLPEYDRYLASSKIMAAAYLDPNLNHTPNSSTKTHLGTGMERSPGAMERVLKVFHYFESNSEPTTWASIIRHGDATDVRGIIQKIVDSHKVKHVACYGFRLSHLRSEEVHWLHVDMGVSSVREKYELAHPPEEWKYELRIRYLPKGFLNQFTEDKPTLNFFYQQVKSDYMLEIADQVDQEIALKLGCLEIRRSYWEMRGNALEKKSNYEVLEKDVGLKRFFPKSLLDSVKAKTLRKLIQQTFRQFANLNREESILKFFEILSPVYRFDKECFKCALGSSWIISVELAIGPEEGISYLTDKGCNPTHLADFTQVQTIQYSNSEDKDRKGMLQLKIAGAPEPLTVTAPSLTIAENMADLIDGYCRLVNGTSQSFIIRPQKEGERALPSIPKLANSEKQGMRTHAVSVSETDDYAEIIDEEDTYTMPSTRDYEIQRERIELGRCIGEGQFGDVHQGIYMSPENPALVVAIKTCKNCTSDSVREKFLQEALTMRQFDHPHIVKLIGVITENPVWIIMELCTLGELRSFLQVRKYSLDLASLILYAYQLSTALAYLESKRFVHRDIAARNVLVSSNDCVKLGDFGLSRYMEDSTYYKASKGKLPIKWMAPESINFRRFTSASDVWMFGVCMWEILMHGVKPFQGVKNNDVIGRIENGERLPMPPNCPPTLYSLMTKCWAYDPSRRPRFTELKAQLSTILEEEKAQQEERMRMESRRQATVSWDSGGSDEAPPKPSRPGYPSPRSSEGFYPSPQHMVQTNHYQVSGYPGSHGITAMAGSIYPGQASLLDQTDSWNHRPQEIAMWQPNVEDSTVLDLRGIGQVLPTHLMEERLIRQQQEMEEDQRWLEKEERFLKPDVRLSRGSIDREDGSLQGPIGNQHIYQPVGKPDPAAPPKKPPRPGAPGHLGSLASLSSPADSYNEGVKLQPQEISPPPTANLDRSNDKVYENVTGLVKAVIEMSSKIQPAPPEEYVPMVKEVGLALRTLLATVDETIPLLPASTHREIEMAQKLLNSDLGELINKMKLAQQYVMTSLQQEYKKQMLTAAHALAVDAKNLLDVIDQARLKMLGQTRPH

SEQ ID NO: 121 - protein, 1074 aa, Homo sapiens
MISADCNLCLPEYDRYLASSKIMAAAYLDPNLNHTPNSSTKTHLGTGMERSPGAMERVLKVFHYFESNSEPTTWASIIRHGDATDVRGIIQKIVDSHKVKHVACYGFRLSHLRSEEVHWLHVDMGVSSVREKYELAHPPEEWKYELRIRYLPKGFLNQFTEDKPTLNFFYQQVKSDYMLEIADQVDQEIALKLGCLEIRRSYWEMRGNALEKKSNYEVLEKDVGLKRFFPKSLLDSVKAKTLRKLIQQTFRQFANLNREESILKFFEILSPVYRFDKECFKCALGSSWIISVELAIGPEEGISYLTDKGCNPTHLADFTQVQTIQYSNSEDKDRKGMLQLKIAGAPEPLTVTAPSLTIAENMADLIDGYCRLVNGTSQSFIIRPQKEGERALPSIPKLANSEKQGMRTHAVSVSETDDYAEIIDEEDTYTMPSTRDYEIQRERIELGRCIGEGQFGDVHQGIYMSPENPALAVAIKTCKNCTSDSVREKFLQEALTMRQFDHPHIVKLIGVITENPVWIIMELCTLGELRSFLQVRKYSLDLASLILYAYQLSTALAYLESKRFVHRDIAARNVLVSSNDCVKLGDFGLSRYMEDSTYYKASKGKLPIKWMAPESINFRRFTSASDVWMFGVCMWEILMHGVKPFQGVKNNDVIGRIENGERLPMPPNCPPTLYSLMTKCWAYDPSRRPRFTELKAQLSTILEEEKAQQEERMRMESRRQATVSWDSGGSDEAPPKPSRPGYPSPRSSEGFYPSPQHMVQTNHYQVSGYPGSHGITAMAGSIYPGQASLLDQTDSWNHRPQEIAMWQPNVEDSTVLDLRGIGQVLPTHLMEERLIRQQQEMEEDQRWLEKEERFLKPDVRLSRGSIDREDGSLQGPIGNQHIYQPVGKPDPAAPPKKPPRSGAPGHLGSLASLSSPADSYNEGVKLQPQEISPPPTANLDRSNDKVYENVTGLVKAVIEMSSKIQPAPPEEYVPMVKEVGLALRTLLATVDETIPLLPASTHREIEMAQKLLNSDLGELINKMKLAQQYVMTSLQQEYKKQMLTAAHALAVDAKNLLDVIDQARLKMLGQTRPH

SEQ ID NO: 122 - protein, 822 aa, Homo sapiens
MGFGSDLKNSHEAVLKLQDWELRLLETVKKFMALRIKSDKEYASTLQNLCNQVDKESTVQMNYVSNVSKSWLLMIQQTEQLSRIMKTHAEDLNSGPLHRLTMMIKDKQQVKKSYIGVHQQIEAEMIKVTKTELEKLKCSYRQLIKEMNSAKEKYKEALAKGKETEKAKERYDKATMKLHMLHNQYVLALKGAQLHQNQYYDITLPLLLDSLQKMQEEMIKALKGIFDEYSQITSLVTEETVNVHKEIQMSVEQIDPSTEYNNFIDVHRTTAAKEQEIEFDTSLLEENENLQANEIMWNNLTAESLQVMLKTLAEELMQTQQMLLNKEEAVLELEKRIEESSETCEKKSDIVLLLSQKQALEELKQSVQQLRCTEAKFSAQKELLEQKVQENDGKEPPPVVNYEEDARSVTSMERKERLSKFESIRHSIAGIIRSPKSAVGSSALSDMISISEKPLAEQDWYHGAIPRIEAQELLKKQGDFLVRESHGKPGEYVLSVYSDGQRRHFIIQYVDNMYRFEGTGFSNIPQLIDHHYTTKQVITKKSGVVLLNPIPKDKKWILSHEDVILGELLGKGNFGEVYKGTLKDKTSVAVKTCKEDLPQELKIKFLQEAKILKQYDHPNIVKLIGVCTQRQPVYIIMELVSGGDFLTFLRRKKDELKLKQLVKFSLDAAAGMLYLESKNCIHRDLAARNCLVGENNVLKISDFGMSRQEDGGVYSSSGLKQIPIKWTAPEALNYGRYSSESDVWSFGILLWETFSLGVCPYPGMTNQQAREQVERGYRMSAPQHCPEDISKIMMKCWDYKPENRPKFSELQKELTIIKRKLT

SEQ ID NO: 123 - protein, 822 aa, Homo sapiens
MGFGSDLKNSHEAVLKLQDWELRLLETVKKFMALRIKSDKEYASTLQNLCNQVDKESTVQMNYVSNVSKSWLLMIQQTEQLSRIMKTHAEDLNSGPLHRLTMMIKDKQQVKKSYIGVHQQIEAEMIKVTKTELEKLKCSYRQLIKEMNSAKEKYKEALAKGKETEKAKERYDKATMKLHMLHNQYVLALKGAQLHQNQYYDITLPLLLDSLQKMQEEMIKALKGIFDEYSQITSLVTEEIVNVHKEIQMSVEQIDPSTEYNNFIDVHRTTAAKEQEIEFDTSLLEENENLQANEIMWNNLTAESLQVMLKTLAEELMQTQQMLLNKEEAVLELEKRIEESSETCEKKSDIVLLLSQKQALEELKQSVQQLRCTEAKFSAQKELLEQKVQENDGKEPPPVVNYEEDARSVTSMERKERLSKFESIRHSIAGIIRSPKSAVGSSALSDMISISEKPLAEQDWYHGAIPRIEAQELLKKQGDFLVRESHGKPGEYVLSVYSDGQRRHFIIQYVDNMYRFEGTGFSNIPLLIDHHYTTKQVITKKSGVVLLNPIPKDKKWILSHEDVILGELLGKGNFGEVYKGTLKDKTSVAVKTCKEDLPQELKIKFLQEAKILKQYDHPNIVKLIGVCTQRQPVYIIMELVSGGDFLTFLRRKKDELKLKQLVKFSLDAAAGMLYLESKNCIHRDLAARNCLVGENNVLKISDFGMSRQEDGGVYSSSGLKQIPIKWTAPEALNYGRYSSESDVWSFGILLWETFSLGVCPYPGMTNQQAREQVERGYRMSAPQHCPEDISKIMMKCWDYKPENRPKFSELQKELTIIKRKLT

SEQ ID NO: 124 - protein, 822 aa, Homo sapiens
MGFGSDLKNSHEAVLKLQDWELRLLETVKKFMALRIKSDKEYASTLQNLCNQVDKESTVQMNYVSNVSKSWLLMIQQTEQLSRIMKTHAEDLNSGPLHRLTMMIKDKQQVKKSYIGVHQQIEAEMIKVTKTELEKLKCSYRQLIKEMNSAKEKYKEALAKGKETEKAKERYDKATMKLHMLHNQYVLALKGAQLHQNQYYDITLPLLLDSLQKMQEEMIKALKGIFDEYSQITSLVTEEIVNVHKEIQMSVEQIDPSTEYNNFIDVHRTTAAKEQEIEFDTSLLEENENLQANEIMWNNLTAESLQVMLKTLAEELMQTQQMLLNKEEAVLELEKRIEESSETCEKKSDIVLLLSQKQALEELKQSVQQLRCTEAKFSAQKELLEQKVQENDGKEPPPVVNYEEDARSVTSMERKERLSKFESIRHSIAGIIRSPKSAVGSSALSDMISISEKPLAEQDWYHGAIPRIEAQELLKKQGDFLVRESHGKPGEYVLSVYSDGQRRHFIIQYVDNMYRFEGTGFSNIPQLIDHHYTTKQVITKKSGVVLLNPIPKDKKWILSHEDVILGELLGKGNFGEVYKGTLKDKTSVAVKTCKEDLPRELKIKFLQEAKILKQYDHPNIVKLIGVCTQRQPVYIIMELVSGGDFLTFLRRKKDELKLKQLVKFSLDAAAGMLYLESKNCIHRDLAARNCLVGENNVLKISDFGMSRQEDGGVYSSSGLKQIPIKWTAPEALNYGRYSSESDVWSFGILLWETFSLGVCPYPGMTNQQAREQVERGYRMSAPQHCPEDISKIMMKCWDYKPENRPKFSELQKELTIIKRKLT

SEQ ID NO: 125 - protein, 822 aa, Homo sapiens [sequence omitted]

SEQ ID NO: 126 - protein, 822 aa, Homo sapiens
MGFSSELCSPQGHGVLQQMQEAELRLLEGMRKWMAQRVKSDREYAGLLHHMSLQDSGGQSRAISPDSPISQSWAEITSQTEGLSRLLRQHAEDLNSGPLSKLSLLIRERQQLRKTYSEQWQQLQQELTKTHSQDIEKLKSQYRALARDSAQAKRKYQEASKDKDRDKAKDKYVRSLWKLFAHHNRYVLGVRAAQLHHQHHHQLLLPGLLRSLQDLHEEMACILKEILQEYLEISSLVQDEVVAIHREMAAAAARIQPEAEYQGFLRQYGSAPDVPPCVTFDESLLEEGEPLEPGELQLNELTVESVQHTLTSVTDELAVATEMVFRRQEMVTQLQQELRNEEENTHPRERVQLLGKRQVLQEALQGLQVALCSQAKLQAQQELLQTKLEHLGPGEPPPVLLLQDDRHSTSSSEQEREGGRTPTLEILKSHISGIFRPKFSLPPPLQLIPEVQKPLHEQLWYHGAIPRAEVAELLVHSGDFLVRESQGKQEYVLSVLWDGLPRHFIIQSLDNLYRLEGEGFPSIPLLIDHLLSTQQPLTKKSGVVLHRAVPKDKWVLNHEDLVLGEQIGRGNFGEVFSGRLRADNTLVAVKSCRETLPPDLKAKFLQEARILKQYSHPNIVRLIGVCTQKQPIYIVMELVQGGDFLTFLRTEGARLRVKTLLQMVGDAAAGMEYLESKCCIHRDLAARNCMVTEKNVLKISDFGMSREEADGVYAASGGLRQVPVKWTAPEALNYGRYSSESDVWSFGILLWETFSLGASPYPNLSNQQTREFVEKGGRLPCPELCPDAVFRLMEQCWAYEPGQRPSFSTIYQELQSIRKRHR

SEQ ID NO: 127 - protein, 822 aa, Homo sapiens
MGFSSELCSPQGHGVLQQMQEAELRLLEGMRKWMAQRVKSDREYAGLLHHMSLQDSGGQSRAISPDSPISQSWAEITSQTEGLSRLLRQHAEDLNSGPLSKLSLLIRERQQLRKTYSEQWQQLQQELTKTHSQDIEKLKSQYRALARDSAQAKRKYQEASKDKDRDKAKDKYVRSLWKLFAHHNRYVLGVRAAQLHHQHHHQLLLPGLLRSLQDLHEEMACILKEILQEYLEISSLVQDEVVAIHREMAAAAARIQPEAEYQGFLRQYGSAPDVPPCVTFDESLLEEGEPLEPGELQLNELTVESVQHTLTSVTDELAVATEMVFRRQEMVTQLQQELRNEEENTHPRERVQLLGKRQVLQEALQGLQVALCSQAKLQAQQELLQTKLEHLGPGEPPPVLLLQDDRHSTSSSEQEREGGRTPTLEILKSHISGIFRPKFSLPPPLQLIPEVQKPLHEQLWYHGAIPRAEVAELLVHSGDFLVRESQGKQEYVLSVLWDGLPRHFIIQSLDNLYRLEGEGFPSIPLLIDHLLSTQQPLTKKSGVVLHRAVPKDKWVLNHEDLVLGEQIGRGNFGEVFSGRLRADNTLVAVKSCRETLPPDLKAKFLQEARILKQYSHPNIVRLIGVCTQKQPIYIVMELVQGGDFLTFLRTEGARLRVKTLLQMVGDAAAGMEYLESKCCIHRDLAARNCLVTEKNVLKISDFGMSREEADGVYAASGGLRQVPMKWTAPEALNYGRYSSESDVWSFGILLWETFSLGASPYPNLSNQQTREFVEKGGRLPCPELCPDAVFRLMEQCWAYEPGQRPSFSTIYQELQSIRKRHR

SEQ ID NO: 128 - protein, 822 aa, Homo sapiens
MWSWKCLLFWAVLVTATLCTARPSPTLPEQAQPWGAPVEVESFLVHPGDLLQLRCRLRDDVQSINWLRDGVQLAESNHTRITGEEVEVQDSVPADSGLYACVTSSPSGSDTTYFSVNVSDALPSSEDDDDDDDSSSEEKETDNTKPNRMPVAPYWTSPEKMEKKLHAVPAAKTVKFKCPSSGTPNPTLRWLKNGKEFKPDHRIGGYKVRYATWSIIMDSVVPSDKGNYTCIVENEYGSINHTYQLDVVERSPHRPILQAGLPANKTVALGSNVEFMCKVYSDPQPHIQWLKHIEVNGSKIGPDNLPYVQILKTAGVNTTDKEMEVLHLRNVSFEDAGEYTCLAGNSIGLSHHSAWLTVLEALEERPAVMTSPLYLEIIIYCTGAFLISCMVGSVIVYKMKSGTKKSDFHSQMAVHKLAKSIPLRRQVTVSADSSASMNSGVLLVRPSRLSSSGTPMLAGVSEYELPEDPRWELPRDRLVLGKPLGEGCFGQVVLAEAIGLDKDKPNRVTKVAVKMLKSDATEKDLSDLISEMEMMKMIGKHKNIINLLGACTQDGPLYVIVEYASKGNLREYLQARRPPGLEYCYNPSHNPEEQLSSKDLVSCAYQVARGMEYLASKKCIHRDLAARNVLVTEDNVMKIADFGLARDIHHIDYYKKTTNGRLPVKWMAPEALFDRIYTHQSDVWSFGVLLWEIFTLGGSPYPGVPVEELFKLLKEGHRMDKPSNCTNELYMMMRDCWHAVPSQRPTFKQLVEDLDRIVALTSNQEYLDLSMPLDQYSPSFPDTRSSTCSSGEDSVFSHEPLPEEPCLPRHPAQLANGGLKRR

SEQ ID NO: 129 - protein, 822 aa, Homo sapiens
MWSWKCLLFWAVLVTATLCTARPSPTLPEQAQPWGAPVEVESFLVHPGDLLQLRCRLRDDVQSINWLRDGVQLAESNRTRITGEEVEVQDSVPADSGLYACVTSSPSGSDTTYFSVNVSDALPSSEDDDDDDDSSSEEKETDNTKPNRMPVAPYWTSPEKMEKKLHAVPAAKTVKFKCPSSGTPNPTLRWLKNGKEFKPDHRIGGYKVRYATWSIIMDSVVPSDKGNYTCIVENEYGSINHTYQLDVVERSSHRPILQAGLPANKTVALGSNVEFMCKVYSDPQPHIQWLKHIEVNGSKIGPDNLPYVQILKTAGVNTTDKEMEVLHLRNVSFEDAGEYTCLAGNSIGLSHHSAWLTVLEALEERPAVMTSPLYLEIIIYCTGAFLISCMVGSVIVYKMKSGTKKSDFHSQMAVHKLAKSIPLRRQVTVSADSSASMNSGVLLVRPSRLSSSGTPMLAGVSEYELPEDPRWELPRDRLVLGKPLGEGCFGQVVLAEAIGLDKDKPNRVTKVAVKMLKSDATEKDLSDLISEMEMMKMIGKHKNIINLLGACTQDGPLYVIVEYASKGNLREYLQARRPPGLEYCYNPSHNPEEQLSSKDLVSCAYQVARGMEYLASKKCIHRDLAARNVLVTEDNVMKIADFGLARDIHHIDYYKKTTNGRLPVKWMAPEALFDRIYTHQSDVWSFGVLLWEIFTLGGSPYPGVPVEELFKLLKEGHRMDKPSNCTNELYMMMRDCWHAVPSQRPTFKQLVEDLDRIVALTSNQEYLDLSMPLDQYSPSFPDTRSSTCSSGEDSVFSHEPLPEEPCLPRHPAQLANGGLKRR

SEQ ID NO: 130 - protein, 822 aa, Homo sapiens
MWSWKCLLFWAVLVTATLCTARPSPTLPEQAQPWGAPVEVESFLVHPGDLLQLRCRLRDDVQSINWLRDGVQLAESNRTRITGEEVEVQDSVPADSGLYACVTSSPSGSDTTYFSVNVSDALPSSEDDDDDDDSSSEEKETDNTKPNRMPVAPYWTSPEKMEKKLHAVPAAKTVKFKCPSSGTPNPTLRWLKNGKEFKPDHRIGGYKVRYATWSIIMDSVVPSDKGNYTCIVENEYGSINHTYQLDVVERSPHRPILQAGLPANKTVSLGSNVEFMCKVYSDPQPHIQWLKHIEVNGSKIGPDNLPYVQILKTAGVNTTDKEMEVLHLRNVSFEDAGEYTCLAGNSIGLSHHSAWLTVLEALEERPAVMTSPLYLEIIIYCTGAFLISCMVGSVIVYKMKSGTKKSDFHSQMAVHKLAKSIPLRRQVTVSADSSASMNSGVLLVRPSRLSSSGTPMLAGVSEYELPEDPRWELPRDRLVLGKPLGEGCFGQVVLAEAIGLDKDKPNRVTKVAVKMLKSDATEKDLSDLISEMEMMKMIGKHKNIINLLGACTQDGPLYVIVEYASKGNLREYLQARRPPGLEYCYNPSHNPEEQLSSKDLVSCAYQVARGMEYLASKKCIHRDLAARNVLVTEDNVMKIADFGLARDIHHIDYYKKTTNGRLPVKWMAPEALFDRIYTHQSDVWSFGVLLWEIFTLGGSPYPGVPVEELFKLLKEGHRMDKPSNCTNELYMMMRDCWHAVPSQRPTFKQLVEDLDRIVALTSNQEYLDLSMPLDQYSPSFPDTRSSTCSSGEDSVFSHEPLPEEPCLPRHPAQLANGGLKRR

SEQ ID NO: 131 - protein, 820 aa, Homo sapiens
MWSWKCLLFWAVLVTATLCTARPSPTLPEQAQPWGAPVEVESFLVHPGDLLQLRCRLRDDVQSINWLRDGVQLAESNRTRITGEEVEVQDSVPADSGLYACVTSSPSGSDTTYFSVNVSDALPSSEDDDDDDDSSSEEKETDNTKPNRMPVAPYWTSPEKMEKKLHAVPAAKTVKFKCPSSGTPNPTLRWLKNGKEFKPDHRIGGYKVRYATWSIIMDSVVPSDKGNYTCIVENEYGSINHTYQLDVVERSPHRPILQAGLPANKTVALGSNVEFMCKVYSDPQPHIQWLKHIEVNGSKIGPDNLPYVQILKTAGVNTTDKEMEVLHLRNVSFEDAGEYTCLAGNSIGLSHHSAWLTVLEALEERPAVMTSPLYLEIIIYCTGAFLISCMVGSVIVYKMKSGTKKSDFHSQMAVHKLAKSIPLRRQVTVSADSSASMNSGVLLVRPSRLSSSGTPMLAGVSEYELPEDPRWELPRDRLVLGKPLGEGCFGQVVLAEAIGLDKDKPNRVTKVAVKMLKSDATEKDLSDLISEMEMMKMIHKNIINLLGACTQDGPLYVIVEYASKGNLREYLQARRPPGLEYCYNPSHNPEEQLSSKDLVSCAYQVARGMEYLASKKCIHRDLAARNVLVTEDNVMKIADFGLARDIHHIDYYKKTTNGRLPVKWMAPEALFDRIYTHQSDVWSFGVLLWEIFTLGGSPYPGVPVEELFKLLKEGHRMDKPSNCTNELYMMMRDCWHAVPSQRPTFKQLVEDLDRIVALTSNQEYLDLSMPLDQYSPSFPDTRSSTCSSGEDSVFSHEPLPEEPCLPRHPAQLANGGLKRR

SEQ ID NO: 132 - protein, 705 aa, Homo sapiens
MVSWGRFICLVVVTMATLSLARPSFSLVEDTTLEPEGAPYWTNTEKMEKRLHAVPAANTVKFRCPAGGNPMPTMRWLKNGKEFKQEHRIGGYKVRNQHWSLIMESVVPSDKGNYTCVVENEYGSINHTYHLDVVERSPHRPILQAGLPANASTVVGGDVEFVCKVYSDAQPHIQWIKHVEKNGSKYGPDGLPYLKVLKHSGINSSNAEVLALFNVTEADAGEYICKVSNYIGQANQSAWLTVLPKQQAPGREKEITASPDYLEIAIYCIGVFLIACMVVTVILCRMKNTTKKPDFSSQPAVHKLTKRIPLRRQVSAESSSSMNSNTPLVRITTRLSSTADTPMLAGVSEYELPEDPKWEFPRDKLTLGKPLGEGCFGQVVMAEAVGIDKDKPKEAVTVAVKMLKDDATEKDLSDLVSEMEMMKMIGKHKNIINLLGACTQDGPLYVIVEYASKGNLREYLRARRPPGMEYSYDINRVPEEQMTFKDLVSCTYQLARRMEYLASQKCIHRDLAARNVLVTENNVMKTADFGLARDINNIDYYKKTTNGRLPVKWMAPEALFDRVYTHQSDVWSFGVLMWEIFTLGGSPYPGIPVEELFKLLKEGHRMDKPANCTNELYMMMRDCWHAVPSQRPTFKQLVEDLDRILTLTTNEEYLDLSQPLEQYSPSYPDTRSSCSSGDDSVFSPDPMPYEPCLPQYPHINGSVKT

SEQ ID NO: 133 - protein, 802 aa, Homo sapiens
MRLLLALLGVLLSVPGPPVLSLEASEEVELEPCLAPSLEQQEQELTVALGQPVRLCCGRAERGGHWYKEGSRLAPAGRVRGWRGRLEIASFLPEDAGRYLCLARGSMIVLQNLTLITGDSLTSSNDDEDPKSHRDPSNRHSYPQQAPYWTHPQRMEKKLHAVPAGNTVKFRCPAAGNPTPTIRWLKDGQAFHGENRIGGIRLRHQHWSLVMESVVPSDRGTYTCLVENAVGSIRYNYLLDVLERSPHRPILQAGLPANTTAVVGSDVELLCKVYSDAQPHIQWLKHIVINGSSFGADGFPYVQVLKTADINSSEVEVLYLRNVSAEDAGEYTCLAGNSIGLSYQSAWLTVLPEEDPTWTAAAPEARCTDIILYASGSLALAVLLLLAGLYRGQALHGRHPRPPATVQKLSRFPLARQFSLESGSSGKSSSSLVRGVRLSSSGPALLAGLVSLDLPLDPLWEFPRDRLVLGKPLGEGCFGQVVRAEAFGMDPARPDQASTVAVKMLKDNASDKDLADLVSEMEVMKLIGRHKNIINLLGVCTQEGPLYVIVECAAKGNLREFLRARRPPGPDLSPDGPRSSEGPLSFPVLVSCAYQVARGMQYLESRKCIHRDLAARNVLVTEDNVMKIADFGLARGVHHIDYYKKTSNGRLPVKWMAPEALFDRVYTHQSDVWSFGILLWEIFTLGGSPYPGIPVEELFSLLREGHRMDRPPHCPPELYGLMRECWHAAPSQRPTFKQLVEALDKVLLAVSEEYLDLRLTFGPYSPSGGDASSTCSSSDSVFSHDPLPLGSSSFPFGSGVQT

SEQ ID NO: 134 - protein, 993 aa, Homo sapiens
MPALARDGGQLPLLVVFSAMIFGTITNQDLPVIKCVLINHKNNDSSVGKSSSYPMVSESPEDLGCALRPQSSGTVYERAAVEVDVSASITLQVLVDAPGNISCLWVFKHSSLNCQPHFDLQNRGVVSMVILKMTETQAGEYLLFIQSEATNYTILFTVSIRNTLLYTLRRPYFRKMENQDALVCISESVPEPIMEWVLCDSQGESCKEESPAVVKKEEKVLHELFGMDIRCCARNELGRECTRLFTIDLNQTPQTTLPQLFLKVGEPLWIRCKAVHVNHGFGLTWELENKALEEGNYFEMSTYSTNRTMIRILFAFVSSVARNDTGYYTCSSSKHPSQSALVTIVEKGFINATNSSEDYEIDQYEEFCFSVRFKAYPQIRCTWTFSRKSFPCEQKGLDNGYSISKFCNHKHQPGEYIFHAENDDAQFTKMFTLNIRRKPQVLAEASASQASCFSDGYPLPSWTWKKCSDKSPNCTEEITEGVWNRKANRKVFGQWVSSSTLNMSEAIKGFLVKCCAYNSLGTSCETILLNSPGPFPFIQDNISFYATIGVCLLFIVVLTLLICHKYKKQFRYESQLQMVQVTGSSDNEYFYVDFREYEYDLKWEFPRENLEFGKVLGSGAFGKVMNATAYGISKTGVSIQVAVKMLKEKADSSEREALMSELKMMTQLGSHENIVNLLGACTLSGPIYLIFEYCCYGDLLNYLRSKREKFHRTWTEIFKEHNFSFYPTFQSHPNSSMPGSREVQIHPDSDQISGLHGNSFHSEDEIEYENQKRLEEEEDLNVLTFEDLLCFAYQVAKGMEFLEFKSCVHRDLAARNVLVTHGKVVKICDFGLARDIMSDSNYVVRGNARLPVKWMAPESLFEGIYTIKSDVWSYGILLWEIFSLGVNPYPGIPVDANFYKLIQNGFKMDQPFYATEEIYIIMQSCWAFDSRKRPSFPNLTSFLGCQLADAEEAMYQNVDGRVSECPHTYQNRRPFSREMDLGLLSPQAQVEDS

SEQ ID NO: 135 - protein, 993 aa, Homo sapiens
MPALARDGGQLPLLVVFSAMIFGTITNQDLPVIKCVLINHKNNDSSVGKSSSYPMVSESPEDLGCALRPQSSGTVYERAAVEVDVSASITLQVLVDAPGNISCLWVFKHSSLNCQPHFDLQNRGVVSMVILKMTETQAGEYLLFIQSEATNYTILFTVSIRNTLLYTLRRPYFRKMENQDALVCISESVPEPIVEWVLCDSQGESCKEESPAVVKKEEKVLHELFGMDIRCCARNELGRECTRLFTIDLNQTPQTTLPQLFLKVGEPLWIRCKAVHVNHGFGLTWELENKALEEGNYFEMSTYSTNRTMIRILFAFVSSVARNDTGYYTCSSSKHPSQSALVTIVEKGFINATNSSEVYEIDQYEEFCFSVRFKAYPQIRCTWTFSRKSFPCEQKGLDNGYSISKFCNHKHQPGEYIFHAENDDAQFTKMFTLNIRRKPQVLAEASASQASCFSDGYPLPSWTWKKCSDKSPNCTEEITEGVWNRKANRKVFGQWVSSSTLNMSEAIKGFLVKCCAYNSLGTSCETILLNSPGPFPFIQDNISFYATIGVCLLFIVVLTLLICHKYKKQFRYESQLQMVQVTGSSDNEYFYVDFREYEYDLKWEFPRENLEFGKVLGSGAFGKVMNATAYGISKTGVSIQVAVKMLKEKADSSEREALMSELKMMTQLGSHENIVNLLGACTLSGPIYLIFEYCCYGDLLNYLRSKREKFHRTWTEIFKEHNFSFYPTFQSHPNSSMPGSREVQIHPDSDQISGLHGNSFHSEDEIEYENQKRLEEEEDLNVLTFEDLLCFAYQVAKGMEFLEFKSCVHRDLAARNVLVTHGKVVKICDFGLARDIMSDSNYVVRGNARLPVKWMAPESLFEGIYTIKSDVWSYGILLWEIFSLGVNPYPGIPVDANFYKLIQNGFKMDQPFYATEEIYIIMQSCWAFDSRKRPSFPNLTSFLGCQLADAEEAMYQNVDGRVSECPHTYQNRRPFSREMDLGLLSPQAQVEDS

SEQ ID NO: 136 - protein, 993 aa, Homo sapiens
MPALARDGGQLPLLVVFSAMIFGTITNQDLPVIKCVLINHKNNDSSVGKSSSYPMVSESPEDLGCALRPQSSGTVYERAAVEVDVSASITLQVLVDAPGNISCLWVFKHSSLNCQPHFDLQNRGVVSMVILKMTETQAGEYLLFIQSEATNYTILFTVSIRNTLLYTLRRPYFRKMENQDALVCISESVPEPIVEWVLCDSQGESCKEESPAVVKKEEKVLHELFGMDIRCCARNELGRECTRLFTIDLNQTPQTTLPQLFLKVGEPLWIRCKAVHVNHGFGLTWELENKALEEGNYFEMSTYSTNRTMIRILFAFVSSVARNDTGYYTCSSSKHPSQSALVTIVEKGFINATNSSEDYEIDQYEEFCFSVRFKAYPQIRCTWTFSRKSFPCEQKGLDNGYSISKFCNHKHQPGEYIFHAENDDAQFTKMFTLNIRRKPQVLAEASASQASCFSDGYPLPSWTWKKCSDKSPNCTEEITEGVWNRKANRKVFGQWVSSSTLNMSEAIKGFLVKCCAYNSLGTSCETILLNSPGPFPFIQDNISFYATIGVCLLFIVILTLLICHKYKKQFRYESQLQMVQVTGSSDNEYFYVDFREYEYDLKWEFPRENLEFGKVLGSGAFGKVMNATAYGISKTGVSIQVAVKMLKEKADSSEREALMSELKMMTQLGSHENIVNLLGACTLSGPIYLIFEYCCYGDLLNYLRSKREKFHRTWTEIFKEHNFSFYPTFQSHPNSSMPGSREVQIHPDSDQISGLHGNSFHSEDEIEYENQKRLEEEEDLNVLTFEDLLCFAYQVAKGMEFLEFKSCVHRDLAARNVLVTHGKVVKICDFGLARDIMSDSNYVVRGNARLPVKWMAPESLFEGIYTIKSDVWSYGILLWEIFSLGVNPYPGIPVDANFYKLIQNGFKMDQPFYATEEIYIIMQSCWAFDSRKRPSFPNLTSFLGCQLADAEEAMYQNVDGRVSECPHTYQNRRPFSREMDLGLLSPQAQVEDS

SEQ ID NO: 137 - protein, 993 aa, Homo sapiens
MPALARDGGQLPLLVVFSAMIFGTITNQDLPVIKCVLINHKNNDSSVGKSSSYPMVSESPEDLGCALRPQSSGTVYERAAVEVDVSASITLQVLVDAPGNISCLWVFKHSSLNCQPHFDLQNRGVVSMVILKMTETQAGEYLLFIQSEATNYTILFTVSIRNTLLYTLRRPYFRKMENQDALVCISESVPEPIVEWVLCDSQGESCKEESPAVVKKEEKVLHELFGMDIRCCARNELGRECTRLFTIDLNQTPQTTLPQLFLKVGEPLWIRCKAVHVNHGFGLTWELENKALEEGNYFEMSTYSTNRTMIRILFAFVSSVARNDTGYYTCSSSKHPSQSALVTIVEKGFINATNSSEDYEIDQYEEFCFSVRFKAYPQIRCTWTFSRKSFPCEQKGLDNGYSISKFCNHKHQPGEYIFHAENDDAQFTKMFTLNIRRKPQVLAEASASQASCFSDGYPLPSWTWKKCSDKSPNCTEEITEGVWNRKANRKVFGQWVSSSTLNMSEAIKGFLVKCCAYNSLGTSCETILLNSPGPFPFIQDNISFYATIGVCLLFIVVLTLLICHKYKKQFRYESQLQMVQVTGSSDNEYFYVDFREYEYDLKWEFPRENLEFGKVLGSGAFGKVMNATAYGISKTGVSIQVAVKMLKEKADSSEREALMSELKMMTQLGSHENIVNLLGACTLSGPIYLIFEYCCYGDLLNYLRSKREKFHRTWTEIFKEHNFSFYPTFQSHPNSSMPGSREVQIHPDSDQISGLHENSFHSEDEIEYENQKRLEEEEDLNVLTFEDLLCFAYQVAKGMEFLEFKSCVHRDLAARNVLVTHGKVVKICDFGLARDIMSDSNYVVRGNARLPVKWMAPESLFEGIYTIKSDVWSYGILLWEIFSLGVNPYPGIPVDANFYKLIQNGFKMDQPFYATEEIYIIMQSCWAFDSRKRPSFPNLTSFLGCQLADAEEAMYQNVDGRVSECPHTYQNRRPFSREMDLGLLSPQAQVEDS

SEQ ID NO: 138 - protein, 993 aa, Homo sapiens
MPALARDGGQLPLLVVFSAMIFGTITNQDLPVIKCVLINHKNNDSSVGKSSSYPMVSESPEDLGCALRPQSSGTVYERAAVEVDVSASITLQVLVDAPGNISCLWVFKHSSLNCQPHFDLQNRGVVSMVILKMTETQAGEYLLFIQSEATNYTILFTVSIRNTLLYTLRRPYFRKMENQDALVCISESVPEPIVEWVLCDSQGESCKEESPAVVKKEEKVLHELFGMDIRCCARNELGRECTRLFTIDLNQTPQTTLPQLFLKVGEPLWIRCKAVHVNHGFGLTWELENKALEEGNYFEMSTYSTNRTMIRILFAFVSSVARNDTGYYTCSSSKHPSQSALVTIVEKGFINATNSSEDYEIDQYEEFCFSVRFKAYPQIRCTWTFSRKSFPCEQKGLDNGYSISKFCNHKHQPGEYIFHAENDDAQFTKMFTLNIRRKPQVLAEASASQASCFSDGYPLPSWTWKKCSDKSPNCTEEITEGVWNRKANRKVFGQWVSSSTLNMSEAIKGFLVKCCAYNSLGTSCETILLNSPGPFPFIQDNISFYATIGVCLLFIVVLTLLICHKYKKQFRYESQLQMVQVTGSSDNEYFYVDFREYEYDLKWEFPRENLEFGKVLGSGAFGKVMNATAYGISKTGVSIQVAVKMLKEKADSSEREALMSELKMMTQLGSHENIVNLLGACTLSGPIYLIFEYCCYGDLLNYLRSKREKFHRTWTEIFKEHNFSFYPTFQSHPNSSMPGSREVQIHPDSDQISGLHGNSFHSEDEIEYENQKRLEEEEDLNVLTFEDLLCFAYQVAKGMEFLEFKSCVHRDLAARNVLVTHGKVVKICDFGLARDIMSDSNYVVRGNAHLPVKWMAPESLFEGIYTIKSDVWSYGILLWEIFSLGVNPYPGIPVDANFYKLIQNGFKMDQPFYATEEIYIIMQSCWAFDSRKRPSFPNLTSFLGCQLADAEEAMYQNVDGRVSECPHTYQNRRPFSREMDLGLLSPQAQVEDS

SEQ ID NO: 139 - protein, 505 aa, Homo sapiens
MSNICQRLWEYLEPYLPCLSTEADKSTVIENPGALCSPQSQRHGHYFVALFDYQARTAEDLSFQAGDKLQVLDTLHEGWWFARHLEKRRDGSSQQLQGYIPSNYVAEDRSLQAEPWFFGAIGRSDAEKQLLYSENKTGSFLIRESESQKGEFSLSVLDGAVVKHYRIKRLDEGGFFLTRRRIFSTLNEFVSHYTKTSDGLCVKLGKPCLKIQVPAPFDLSYKTVDQWEIDRNSIQLLKRLGSGQFGEVWEGLWNNTTPVAVKTLKPGSMDPNDFLREAQIMKNLRHPKLIQLYAVCTLEDPIYIITELMRHGSLQEYLQNDTGSKIHLTQQVDMAAQVASGMAYLESRNYIHRDLAARNVLVGEHNIYKVADFGLARVFKVDNEDIYESRHEIKLPVKWTAPEAIRSNKFSIKSDVWSFGILLYEIITYGKMPYSGMTGAQVIQMLAQNYRLPQPSNCPQQFYNIMLECWNAEPKERPTFETLRWKLEDYFETDSSYSDANNFIR

SEQ ID NO: 140 - protein, 505 aa, Homo sapiens
MSNICQRLWEYLEPYLPCLSTEADKSTVIENPGALCSPQSQRHGHYFVALFDYQARTAEDLSFRAGDKLQVLDTLHEGWWFARHLEKRRDGSSQQLQGYIPSNYVAEDRSLQAEPWFFAAIGRSDAEKQLLYSENKTGSFLIRESESQKGEFSLSVLDGAVVKHYRIKRLDEGGFFLTRRRIFSTLNEFVSHYTKTSDGLCVKLGKPCLKIQVPAPFDLSYKTVDQWEIDRNSIQLLKRLGSGQFGEVWEGLWNNTTPVAVKTLKPGSMDPNDFLREAQIMKNLRHPKLIQLYAVCTLEDPIYIITELMRHGSLQEYLQNDTGSKIHLTQQVDMAAQVASGMAYLESRNYIHRDLAARNVLVGEHNIYKVADFGLARVFKVDNEDIYESRHEIKLPVKWTAPEAIRSNKFSIKSDVWSFGILLYEIITYGKMPYSGMTGAQVIQMLAQNYRLPQPSNCPQQFYNIMLECWNAEPKERPTFETLRWKLEDYFETDSSYSDANNFIR

SEQ ID NO: 141 - protein, 505 aa, Homo sapiens
MSNICQRLWEYLEPYLPCLSTEADKSTVIENPGALCSPQSQRHGHYFVALFDYQARTAEDLSFRAGDKLQVLDTLHEGWWFARHLEKRRDGSSQQLQGYIPSNYVAEDRSLQAEPWFFGAIGRSDAEKQLLYSENKTGSFLIRESESQKGEFSLSVLDGAVVKHYRIKRLDEGGFFLTRRRIFSTLNEFVSHYTKTSDGLCVKLGKPCLKIQVPAPFDLSYKTVDQWEIDRNSIQLLKRLGSGQFGEVWEGLWNNTTPVAVKTLKPGSMDPNDFLREAQIMKNLRHPKLIQLYAVCTLEDPIYIITELMRHGSLQEYLQNDTGSKIHLTQQVDMAAQVASGMAYLESRNYIHRDLAARNVLVGEHNIYKVADFGLARVFKVDNEDIYESRHEIKLPVKWTAPEAIHSNKFSIKSDVWSFGILLYEIITYGKMPYSGMTGAQVIQMLAQNYRLPQPSNCPQQFYNIMLECWNAEPKERPTFETLRWKLEDYFETDSSYSDANNFIR

SEQ ID NO: 142 - protein, 537 aa, Homo sapiens
MGCVQCKDKEATKLTEERDGSLNQSSGYRYGTDPTPQHYPSFGVTSIPNYNNFHAAGGQGLTVFGGVNSSSHTGTLRTRGGTGVTLFVALYDYEARTEDDLSFHKGEKFQILNSSEGDWWEARSLTTGETGYIPSNYVAPVDSIQAEEWYFGKLGRKDAERQLLSFGNPRGTFLIRESETTKGAYSLSIRDWDDMKGDHVKHYKIRKLDNGGYYITTRAQFETLQQLVQHYSERAAGLCCRLVVPCHKGMPRLTDLSVKTKDVWEIPRESLQLIKRLGNGQFGEVWMGTWNGNTKVAIKTLKPGTMSPESFLEEAQIMKKLKHDKLVQLYAVVSEEPIYIVTEYMNKGSLLDFLKDGEGRALKLPNLVDMAAQVAAGMAYIERMNYIHRDLRSANILVGNGLICKIADFGLARLIEDNEYTARQGAKFPIKWTAPEAALYGRFTIKSDVWSFGILLTELVTKGRVPYPGMNNREVLEQVERGYRMPCPQDCPISLHELMIHCWKKDPEERPTFEYLQSFLKDYFTATEPQYQPGENL

SEQ ID NO: 143 - protein, 1255 aa, Homo sapiens
MELAALCRWGLLLALLPPGAASTQVCTGTDMKLRLPASPETHLDMLRHLYQGCQVVQGNLELTYLPTNASLSFLQDIQEVQGYVLIAHNQVRQVPLQRLRIVRGTQLFEDNYALAVLDNGDPLNNTTPVTGASPGGLRELQLRSLTEILKGGVLIQRNPQLCYQDTILWKDIFHKNNQLALTLIDTNRSRACHPCSPMCKGSRCWGESSEDCQSLTRTVCAGGCARCKGPLPTDCCHEQCAAGCTGPKHSDCLACLHFNHSGICELHCPALVTYNTDTFESMPNPEGRYTFGASCVTACPYNYLSTDVGSCTLVCPLHNQEVTAEDGTQRCEKCSKPCARVCYGLGMEHLREVRAVTSANIQEFAGCKKIFGSLAFLPESFDGDPASNTAPLQPEQLQVFETLEEITGYLYISAWPDSLPDLSVFQNLQVIRGRILHNGAYSLTLQGLGISWLGLRSLRELGSGLALIHHNTHLCFVHTVPWDQLFRNPHQALLHTANRPEDECVGEGLACHQLCARVHCWGPGPTQCVNCSQFLRGQECVEECRVLQGLPREYVNARHCLPCHPECQPQNGSVTCFGPEADQCVACAHYKDPPFCVARCPSGVKPDLSYMPIWKFPDEEGACQPCPINCTHSCVDLDDKGCPAEQRASPLTSIISAVVGILLVVVLGVVFGILIKRRQQKIRKYTMRRLLQETELVEPLTPSGAMPNQAQMRILKETELRKVKVLGSGAFGTVYKGIWIPDGENVKIPVAIKVLRENTSPKANKEILDEAYVMAGVGSPYVSRLLGICLTSTVQLVTQLMPYGCLLDHVRENRGRLGSQDLLNWCMQIAKGMSYLEDVRLVHRDLAARNVLVKSPNHVKITDFGLARLLDIDETEYHADGGKVPIKWMALESILRRRFTHQSDVWSYGVTVWELMTFGAKPYDGIPAREIPDLLEKGERLPQPPICTIDVYMIMVKCWMIDSECRPRFRELVSEFSRMARDPQRFVVIQNEDLGPASPLDSTFYRSLLEDDDMGDLVDAEEYLVPQQGFFCPDPAPGAGGMVHHRHRSSSTRSGGGDLTLGLEPSEEEAPRSPLAPSEGAGSDVFDGDLGMGAAKGLQSLPTHDPSPLQRYSEDPTVPLPSETDGYVAPLTCSPQPEYVNQPDVRPQPPSPREGPLPAARPAGATLERPKTLSPGKNGVVKDVFAFGGAVENPEYLTPQGGAAPQPHPPPAFSPAFDNLYYWDQDPPERGAPPSTFKGTPTAENPEYLGLDVPV

SEQ ID NO: 144 - protein, 1255 aa, Homo sapiens
MELAALCRWGLLLALLPPGAASTQVCTGTDMKLRLPASPETHLDMLRHLYQGCQVVQGNLELTYLPTNASLSFLQDIQEVQGYVLIAHNQVRQVPLQRLRIVRGTQLFEDNYALAVLDNGDPLNNTTPVTGASPGGLRELQLRSLTEILKGGVLIQRNPQLCYQDTILWKDIFHKNNQLALTLIDTNRSRACHPCSPMCKGSRCWGESSEDCQSLTRTVCAGGCARCKGPLPTDCCHEQCAAGCTGPKHSDCLACLHFNHSGICELHCPALVTYNTDTFESMPNPEGRYTFGASCVTACPYNYLSTDVGSCTLVCPLHNQEVTAEDGTQRCEKCSKPCARVCYGLGMEHLREVRAVTSANIQEFAGCKKIFGSLAFLPESFDGDPASNTAPLQPEQLQVFETLEEITGYLYISAWPDSLPDLSVFQNLQVIRGRILHNGAYSLTLQGLGISWLGLRSLRELGSGLALIHHNTHLCFVHTVPWDQLFRNPHQALLHTANRPEDECVGEGLACHQLCARGHCWGPGPTQCVNCSQFLRGQECVEECRVLQGLPREYVNARHCLPCHPECQPQNGSVTCFGPEADQCVACAHYKDPPFCVARCPSGVKPDLSYMPIWKFPDEEGACQPCPINCTHSCVDLDDKGCPAEQRASPLTSIISAVVGILLVVVLGVVFGILIKRRQQKIRKYTMRRLLQETELVEPLTPSGAMPNQAQMRILKETELRKVKVLGSGAFGTVYKGIWIPDGENVKIPVAIKVLRENTSPKANKEILDEAYVMAGVGSPYVSRLLGICLTSTVQLVTQLMPYGCLLDHVRENRGRLGSQDLLNWCMQIVKGMSYLEDVRLVHRDLAARNVLVKSPNHVKITDFGLARLLDIDETEYHADGGKVPIKWMALESILRRRFTHQSDVWSYGVTVWELMTFGAKPYDGIPAREIPDLLEKGERLPQPPICTIDVYMIMVKCWMIDSECRPRFRELVSEFSRMARDPQRFVVIQNEDLGPASPLDSTFYRSLLEDDDMGDLVDAEEYLVPQQGFFCPDPAPGAGGMVHHRHRSSSTRSGGGDLTLGLEPSEEEAPRSPLAPSEGAGSDVFDGDLGMGAAKGLQSLPTHDPSPLQRYSEDPTVPLPSETDGYVAPLTCSPQPEYVNQPDVRPQPPSPREGPLPAARPAGATLERPKTLSPGKNGVVKDVFAFGGAVENPEYLTPQGGAAPQPHPPPAFSPAFDNLYYWDQDPPERGAPPSTFKGTPTAENPEYLGLDVPV

SEQ ID NO: 145 - protein, 1255 aa, Homo sapiens
MELAALCRWGLLLALLPPGAASTQVCTGTDMKLRLPASPETHLDMLRHLYQGCQVVQGNLELTYLPTNASLSFLQDIQEVQGYVLIAHNQVRQVPLQRLRIVRGTQLFEDNYALAVLDNGDPLNNTTPVTGASPGGLRELQLRSLTEILKGGVLIQRNPQLCYQDTILWKDIFHKNNQLALTLIDTNRSRACHPCSPMCKGSRCWGESSEDCQSLTRTVCAGGCARCKGPLPTDCCHEQCAAGCTGPKHSDCLACLHFNHSGICELHCPALVTYNTDTFESMPNPEGRYTFGASCVTACPYNYLSTDVGSCTLVCPLHNQEVTAEDGTQRCEKCSKPCARVCYGLGMEHLREVRAVTSANIQEFAGCKKIFGSLAFLPESFDGDPASNTAPLQPEQLQVFETLEEITGYLYISAWPDSLPDLSVFQNLQVIRGRILHNGAYSLTLQGLGISWLGLRSLRELGSGLALIHHNTHLCFVHTVPWDQLFRNPHQALLHTANRPEDECVGEGLACHQLCARGHCWGPGPTQCVNCSQFLRGQECVEECRVLQGLPREYVNARHCLPCHPECQPQNGSVTCFGPEADQCVACAHYKDPPFCVARCPSGVKPDLSYMPIWKFPDEEGACQPCPINCTHSCVDLDDKGCPAEQRASPLTSIISAVVGILLVVVLGVVFGILIKRRQQKIRKYTMRRLLQETELVEPLTPSGAMPNQAQMRILKETELRKVKVLGSGAFGTVYKGIWIPDGENVKIPVAIKVLRENTSPKANKEILDEAYVMAGVGSPYVSRLLGICLTSTVQLVTQLMPYGCLLDHVRENRGRLGSQDLLNWCMQIAKGMSYLEDVRLVHRDLAARNVLVKSPNHVKITDFGLARLLDIDETEYHADGGKVPIKWMALESILRRRFTHQSDVWSYGVTVWELMTFGAKPYDGIPARDIPDLLEKGERLPQPPICTIDVYMIMVKCWMIDSECRPRFRELVSEFSRMARDPQRFVVIQNEDLGPASPLDSTFYRSLLEDDDMGDLVDAEEYLVPQQGFFCPDPAPGAGGMVHHRHRSSSTRSGGGDLTLGLEPSEEEAPRSPLAPSEGAGSDVFDGDLGMGAAKGLQSLPTHDPSPLQRYSEDPTVPLPSETDGYVAPLTCSPQPEYVNQPDVRPQPPSPREGPLPAARPAGATLERPKTLSPGKNGVVKDVFAFGGAVENPEYLTPQGGAAPQPHPPPAFSPAFDNLYYWDQDPPERGAPPSTFKGTPTAENPEYLGLDVPV

SEQ ID NO: 146 - protein, 1255 aa, Homo sapiens
MELAALCRWGLLLALLPPGAASTQVCTGTDMKLRLPASPETHLDMLRHLYQGCQVVQGNLELTYLPTNASLSFLQDIQEVQGYVLIAHNQVRQVPLQRLRIVRGTQLFEDNYALAVLDNGDPLNNTTPVTGASPGGLRELQLRSLTEILKGGVLIQRNPQLCYQDTILWKDIFHKNNQLALTLIDTNRSRACHPCSPMCKGSRCWGESSEDCQSLTRTVCAGGCARCKGPLPTDCCHEQCAAGCTGPKHSDCLACLHFNHSGICELHCPALVTYNTDTFESMPNPEGRYTFGASCVTACPYNYLSTDVGSCTLVCPLHNQEVTAEDGTQRCEKCSKPCARVCYGLGMEHLREVRAVTSANIQEFAGCKKIFGSLAFLPESFDGDPASNTAPLQPEQLQVFETLEEITGYLYISAWPDSLPDLSVFQNLQVIRGRILHNGAYSLTLQGLGISWLGLRSLRELGSGLALIHHNTHLCFVHTVPWDQLFRNPHQALLHTANRPEDECVGEGLACHQLCARGHCWGPGPTQCVNCSQFLRGQECVEECRVLQGLPREYVNARHCLPCHPECQPQNGSVTCFGPEADQCVACAHYKDPPFCVARCPSGVKPDLSYMPIWKFPDEEGACQPCPINCTHSCVDLDDKGCPAEQRASPLTSIISAVVGILLVVVLGVVFGILIKRRQQKIRKYTMRRLLQETELVEPLTPSGAMPNQAQMRILKETELRKVKVLGSGAFGTVYKGIWIPDGENVKIPVAIKVLRENTSPKANKEILDEAYVMAGVGSPYVSRLLGICLTSTVQLVTQLMPYGCLLDHVRENRGRLGSQDLLNWCMQIAKGMSYLEDVRLVHRDLAARNVLVKSPNHVKITDFGLARLLDIDETEYHADGGKVPIKWMALESILRRRFTHQSDVWSYGVTVWELMTFGAKPYDGIPAREIPDLLEKGERLPQPPICTIDVYMIMVKCWMIDSECRPRFRELVSEFSRMARDPQRFVVIQNEDLGPASPLDSTFYRSLLEDDDMEDLVDAEEYLVPQQGFFCPDPAPGAGGMVHHRHRSSSTRSGGGDLTLGLEPSEEEAPRSPLAPSEGAGSDVFDGDLGMGAAKGLQSLPTHDPSPLQRYSEDPTVPLPSETDGYVAPLTCSPQPEYVNQPDVRPQPPSPREGPLPAARPAGATLERPKTLSPGKNGVVKDVFAFGGAVENPEYLTPQGGAAPQPHPPPAFSPAFDNLYYWDQDPPERGAPPSTFKGTPTAENPEYLGLDVPV

SEQ ID NO: 147 - protein, 1255 aa, Homo sapiens
MELAALCRWGLLLALLPPGAASTQVCTGTDMKLRLPASPETHLDMLRHLYQGCQVVQGNLELTYLPTNASLSFLQDIQEVQGYVLIAHNQVRQVPLQRLRIVRGTQLFEDNYALAVLDNGDPLNNTTPVTGASPGGLRELQLRSLTEILKGGVLIQRNPQLCYQDTILWKDIFHKNNQLALTLIDTNRSRACHPCSPMCKGSRCWGESSEDCQSLTRTVCAGGCARCKGPLPTDCCHEQCAAGCTGPKHSDCLACLHFNHSGICELHCPALVTYNTDTFESMPNPEGRYTFGASCVTACPYNYLSTDVGSCTLVCPLHNQEVTAEDGTQRCEKCSKPCARVCYGLGMEHLREVRAVTSANIQEFAGCKKIFGSLAFLPESFDGDPASNTAPLQPEQLQVFETLEEITGYLYISAWPDSLPDLSVFQNLQVIRGRILHNGAYSLTLQGLGISWLGLRSLRELGSGLALIHHNTHLCFVHTVPWDQLFRNPHQALLHTANRPEDECVGEGLACHQLCARGHCWGPGPTQCVNCSQFLRGQECVEECRVLQGLPREYVNARHCLPCHPECQPQNGSVTCFGPEADQCVACAHYKDPPFCVARCPSGVKPDLSYMPIWKFPDEEGACQPCPINCTHSCVDLDDKGCPAEQRASPLTSIISAVVGILLVVVLGVVFGILIKRRQQKIRKYTMRRLLQETELVEPLTPSGAMPNQAQMRILKETELRKVKVLGSGAFGTVYKGIWIPDGENVKIPVAIKVLRENTSPKANKEILDEAYVMAGVGSPYVSRLLGICLTSTVQLVTQLMPYGCLLDHVRENRGRLGSQDLLNWCMQIAKGMSYLEDVRLVHRDLAARNVLVKSPNHVKITDFGLARLLDIDETEYHADGGKVPIKWMALESILRRRFTHQSDVWSYGVTVWELMTFGAKPYDGIPAREIPDLLEKGERLPQPPICTIDVYMIMVKCWMIDSECRPRFRELVSEFSRMARDPQRFVVIQNEDLGPASPLDSTFYRSLLEDDDMGDLVDAEEYLVPQQGFFCPDPAPGAGGMVHHRHRSSSTRSGGGDLTLGLEPSEEEAPRSPLAPSEGAGSDVFDGDLGMGAAKGLQSLPTHDPSPLQRYSEDPTVPLPSETDGYVAPLTCSPQPEYVNQPDVRPQPPSPREGPLPAARPAGATLERPKTLSPGKNGVVKDVFAFGGAVENPEYLTPQGGAAPQPHPPPAFSPDFDNLYYWDQDPPERGAPPSTFKGTPTAENPEYLGLDVPV

SEQ ID NO: 148 - protein, 1342 aa, Homo sapiens
MRANDALQVLGLLFSLARGSEVGNSQAVCPGTLNGLSVTGDAENQYQTLYKLYERCEVVMGNLEIVLTGHNADLSFLQWIREVTGYVLVAMNEFSTLPLPNLRVVRGTQVYDGKFAIFVMLNYNTKSSHALRQLRLTQLTEILSGGVYIEKNDKLCHMDTIDWRDIVRDRDAEIVVKDNGRSCPPCHEVCKGRCWGPGSEDCQTLTKTICAPQCNGHCFGPNPNQCCHDECAGGCSGPQDTDCFACRHFNDSGACVPRCPQPLVYNKLTFQLEPNPHTKYQYGGVCVASCPHNFVVDQTSCVRACPPDKMEVDKNGLKMCEPCGGLCPKACEGTGSGSRFQTVDSSNIDGFVNCTKILGNLDFLITGLNGDPWHKIPALDPEKLNVFRTVREITGYLNIQSWPPHMHNFSVFSNLTTIGGRSLYNRGFSLLIMKNLNVTSLGFRSLKEISAGRIYISANRQLCYHHSLNWTKVLRGPTEERLDIKHNRPRRDCVAEGKVCDPLCSSGGCWGPGPGQCLSCRNYSRGGVCVTHCNFLNGEPREFAHEAECFSCHPECQPMEGTATCNGSGSDTCAQCAHFRDGPHCVSSCPHGVLGAKGPIYKYPDVQNECRPCHENCTQGCKGPELQDCLGQTLVLIGKTHLTMALTVIAGLVVIFMMLGGTFLYWRGRRIQNKRAMRRYLERGESIEPLDPSEKANKVLARIFKETELRKLKVLGSGVFGTVHKGVWIPEGESIKIPVCIKVIEDKSGRQSFQAVTDHMLAIGSLDHAHIVRLLGLCPGSSLQLVTQYLPLGSLLDHVRQHRGALGPQLLLNWGVQIAKGMYYLEEHGMVHRNLAARNVLLKSPSQVQVADFGVADLLPPDDKQLLYSEAKTPIKWMALESIHFGKYTHQSDVWSYGVTVWELMTFGAEPYAGLRLAEVPDLLEKGERLAQPQICTIDVYMVMVKCWMIDENIRPTFKELANEFTRMARDPPRYLVIKRESGPGIAPGPEPHGLTNKKLEEVELEPELDLDLDLEAEEDNLATTTLGSALSLPVGTLNRPRGSQSLLSPSSGYMPMNQGNLGESCQESAVSGSSERCPRPVSLHPMPRGCLASESSEGHVTGSEAELQEKVSMCRSRSRSRSPRPRGDSAYHSQRHSLLTPVTPLSPPGLEEEDVNGYVMPDTHLKGTPSSREGTLSSVGLSSVLGTEEEDEDEEYEYMNRRRRHSPPHPPRPSSLEELGYEYMDVGSDLSASLGSTQSCPLHPVPIMPTAGTTPDEDYEYMNRQRDGGGPGGDYAAMGACPASEQGYEEMRAFQGPGHQAPHVHYARLKTLRSLEATDSAFDNPDYWHSRLFPKANAQRT

SEQ ID NO: 149 - protein, 1342 aa, Homo sapiens
MRANDALQVLGLLFSLARGSEVGNSQAVCPGTLNGLSVTGDAENQYQTLYKLYERCEVVMGNLEIVLTGHNADLSFLQWIREVTGYVLVAMNEFSTLPLPNLRVVRGTQVYDGKFAIFVMLNYNTNSSHALRQLRLTQLTEILSGGVYIEKNDKLCHMDTIDWRDIVRDRDAEIVVKDNGRSCPPCHEVCKGRCWGPGSEDCQTLTKTICAPQCNGHCFGPNPNQCCHDECAGGCSGPQDTDCFACRHFNDSGACVPRCPQPLVYNKLTFQLEPNPHTKYQYGGVCVASCPHNFVVDQTSCVRACPPDKMEVDKNGLKMCEPCGGLCPKACEGTGSGSRFQTVDSSNIDGFVNCTKILGNLDFLITGLNGDPWHKIPALDPEKLNVFRTVREITGYLNIQSWPPHMHNFSVFSNLTTIGGRSLYNRGFSLLIMKNLNVTSLGFRSLKEISAGRIYISANRQLCYHHSLNWTKVLRGPTEERLDIKHNRPRRDCVAEGKVCDPLCSSGGCWGPGPGQCLSCRNYSRGGVCVTHCNFLNGEPREFAHEAECFSCHPECQPMEGTATCNGSGSDTCAQCAHFRDGPHCVSSCPHGVLGAKGPIYKYPDVQNECWPCHENCTQGCKGPELQDCLGQTLVLIGKTHLTMALTVIAGLVVIFMMLGGTFLYWRGRRIQNKRAMRRYLERGESIEPLDPSEKANKVLARIFKETELRKLKVLGSGVFGTVHKGVWIPEGESIKIPVCIKVIEDKSGRQSFQAVTDHMLAIGSLDHAHIVRLLGLCPGSSLQLVTQYLPLGSLLDHVRQHRGALGPQLLLNWGVQIAKGMYYLEEHGMVHRNLAARNVLLKSPSQVQVADFGVADLLPPDDKQLLYSEAKTPIKWMALESIHFGKYTHQSDVWSYGVTVWELMTFGAEPYAGLRLAEVPDLLEKGERLAQPQICTIDVYMVMVKCWMIDENIRPTFKELANEFTRMARDPPRYLVIKRESGPGIAPGPEPHGLTNKKLEEVELEPELDLDLDLEAEEDNLATTTLGSALSLPVGTLNRPRGSQSLLSPSSGYMPMNQGNLGESCQESAVSGSSERCPRPVSLHPMPRGCLASESSEGHVTGSEAELQEKVSMCRSRSRSRSPRPRGDSAYHSQRHSLLTPVTPLSPPGLEEEDVNGYVMPDTHLKGTPSSREGTLSSVGLSSVLGTEEEDEDEEYEYMNRRRRHSPPHPPRPSSLEELGYEYMDVGSDLSASLGSTQSCPLHPVPIMPTAGTTPDEDYEYMNRQRDGGGPGGDYAAMGACPASEQGYEEMRAFQGPGHQAPHVHYARLKTLRSLEATDSAFDNPDYWHSRLFPKANAQRT

SEQ ID NO: 150 - protein, 1342 aa, Homo sapiens
MRANDALQVLGLLFSLARGSEVGNSQAVCPGTLNGLSVTGDAENQYQTLYKLYERCEVVMGNLEIVLTGHNADLSFLQWIREVTGYVLVAMNEFSTLPLPNLRVVRGTQVYDGKFAIFVMLNYNTNSSHALRQLRLTQLTEILSGGVYIEKNDKLCHMDTIDWRDIVRDRDAEIVVKDNGRSCPPCHEVCKGRCWGPGSEDCQTLTKTICAPQCNGHCFGPNPNQCCHDECAGGCSGPQDTDCFACRHFNDSGACVPRCPQPLVYNKLTFQLEPNPHTKYQYGGVCVASCPHNFVVDQTSCVRACPPDKMEVDKNGLKMCEPCGGLCPKACEGTGSGSRFQTVDSSNIDGFVNCTKILGNLDFLITGLNGDPWHKIPALDPEKLNVFRTVREITGYLNIQSWPPHMHNFSVFSNLTTIGGRSLYNRGFSLLIMKNLNVTSLGFRSLKEISAGRIYISANRQLCYHHSLNWTKVLRGPTEERLDIKHNRPRRDCVAEGKVCDPLCSSGGCWGPGPGQCLSCRNYSRGGVCVTHCNFLNGEPREFAHEAECFSCHPECQPMEGTATCNGSGSDTCAQCAHFRDGPHCVSSCPHGVLGAKGPIYKYPDVQNECRPCHENCTQGCKGPELQDCLGQTLVLIGKTHLTMALTVIAGLVVIFMMLGGTFLYWHGRRIQNKRAMRRYLERGESIEPLDPSEKANKVLARIFKETELRKLKVLGSGVFGTVHKGVWIPEGESIKIPVCIKVIEDKSGRQSFQAVTDHMLAIGSLDHAHIVRLLGLCPGSSLQLVTQYLPLGSLLDHVRQHRGALGPQLLLNWGVQIAKGMYYLEEHGMVHRNLAARNVLLKSPSQVQVADFGVADLLPPDDKQLLYSEAKTPIKWMALESIHFGKYTHQSDVWSYGVTVWELMTFGAEPYAGLRLAEVPDLLEKGERLAQPQICTIDVYMVMVKCWMIDENIRPTFKELANEFTRMARDPPRYLVIKRESGPGIAPGPEPHGLTNKKLEEVELEPELDLDLDLEAEEDNLATTTLGSALSLPVGTLNRPRGSQSLLSPSSGYMPMNQGNLGESCQESAVSGSSERCPRPVSLHPMPRGCLASESSEGHVTGSEAELQEKVSMCRSRSRSRSPRPRGDSAYHSQRHSLLTPVTPLSPPGLEEEDVNGYVMPDTHLKGTPSSREGTLSSVGLSSVLGTEEEDEDEEYEYMNRRRRHSPPHPPRPSSLEELGYEYMDVGSDLSASLGSTQSCPLHPVPIMPTAGTTPDEDYEYMNRQRDGGGPGGDYAAMGACPASEQGYEEMRAFQGPGHQAPHVHYARLKTLRSLEATDSAFDNPDYWHSRLFPKANAQRT

SEQ ID NO: 151 - protein, 1342 aa, Homo sapiens
MRANDALQVLGLLFSLARGSEVGNSQAVCPGTLNGLSVTGDAENQYQTLYKLYERCEVVMGNLEIVLTGHNADLSFLQWIREVTGYVLVAMNEFSTLPLPNLRVVRGTQVYDGKFAIFVMLNYNTNSSHALRQLRLTQLTEILSGGVYIEKNDKLCHMDTIDWRDIVRDRDAEIVVKDNGRSCPPCHEVCKGRCWGPGSEDCQTLTKTICAPQCNGHCFGPNPNQCCHDECAGGCSGPQDTDCFACRHFNDSGACVPRCPQPLVYNKLTFQLEPNPHTKYQYGGVCVASCPHNFVVDQTSCVRACPPDKMEVDKNGLKMCEPCGGLCPKACEGTGSGSRFQTVDSSNIDGFVNCTKILGNLDFLITGLNGDPWHKIPALDPEKLNVFRTVREITGYLNIQSWPPHMHNFSVFSNLTTIGGRSLYNRGFSLLIMKNLNVTSLGFRSLKEISAGRIYISANRQLCYHHSLNWTKVLRGPTEERLDIKHNRPRRDCVAEGKVCDPLCSSGGCWGPGPGQCLSCRNYSRGGVCVTHCNFLNGEPREFAHEAECFSCHPECQPMEGTATCNGSGSDTCAQCAHFRDGPHCVSSCPHGVLGAKGPIYKYPDVQNECRPCHENCTQGCKGPELQDCLGQTLVLIGKTHLTMALTVIAGLVVIFMMLGGTFLYWRGRRIQNKRAMRRYLERGESIEPLDPSEKANKVLARIFKETELRKLKVLGSGVFGTVHKGVWIPEGESIKIPVCIKVIEDKSGRQSFQAVTDHMLAIGSLDHAHIVRLLGLCPGSSLQLVTQYLPLGSLLDHVRQHRGALGPQLLLNWGVQIAKGMYYLEEHGMVHRNLAARNVLLKSPSQVQVADFGVADLLPPDDKQLLYSEAKTPIKWMALESIHFGKYTHQSDVWSYGVTVWELMTFGAEPYAGLRLAEVPDLLEKGERLAQPQICTIDVYMVMVKCWMIDENIRPTFKELANEFTRMARDPPRYLVIKRESGPGIAPGPEPHGLTNKKLEEVELEPELDLDLDLEAEEDNLATTTLGSALSLPVGTLNRPRGSQSLLSPSSGYMPMNQGNLGESCQESAVSGSSEWCPRPVSLHPMPRGCLASESSEGHVTGSEAELQEKVSMCRSRSRSRSPRPRGDSAYHSQRHSLLTPVTPLSPPGLEEEDVNGYVMPDTHLKGTPSSREGTLSSVGLSSVLGTEEEDEDEEYEYMNRRRRHSPPHPPRPSSLEELGYEYMDVGSDLSASLGSTQSCPLHPVPIMPTAGTTPDEDYEYMNRQRDGGGPGGDYAAMGACPASEQGYEEMRAFQGPGHQAPHVHYARLKTLRSLEATDSAFDNPDYWHSRLFPKANAQRT

SEQ ID NO: 152 - protein, 1342 aa, Homo sapiens
MRANDALQVLGLLFSLARGSEVGNSQAVCPGTLNGLSVTGDAENQYQTLYKLYERCEVVMGNLEIVLTGHNADLSFLQWIREVTGYVLVAMNEFSTLPLPNLRVVRGTQVYDGKFAIFVMLNYNTNSSHALRQLRLTQLTEILSGGVYIEKNDKLCHMDTIDWRDIVRDRDAEIVVKDNGRSCPPCHEVCKGRCWGPGSEDCQTLTKTICAPQCNGHCFGPNPNQCCHDECAGGCSGPQDTDCFACRHFNDSGACVPRCPQPLVYNKLTFQLEPNPHTKYQYGGVCVASCPHNFVVDQTSCVRACPPDKMEVDKNGLKMCEPCGGLCPKACEGTGSGSRFQTVDSSNIDGFVNCTKILGNLDFLITGLNGDPWHKIPALDPEKLNVFRTVREITGYLNIQSWPPHMHNFSVFSNLTTIGGRSLYNRGFSLLIMKNLNVTSLGFRSLKEISAGRIYISANRQLCYHHSLNWTKVLRGPTEERLDIKHNRPRRDCVAEGKVCDPLCSSGGCWGPGPGQCLSCRNYSRGGVCVTHCNFLNGEPREFAHEAECFSCHPECQPMEGTATCNGSGSDTCAQCAHFRDGPHCVSSCPHGVLGAKGPIYKYPDVQNECRPCHENCTQGCKGPELQDCLGQTLVLIGKTHLTMALTVIAGLVVIFMMLGGTFLYWRGRRIQNKRAMRRYLERGESIEPLDPSEKANKVLARIFKETELRKLKVLGSGVFGTVHKGVWIPEGESIKIPVCIKVIEDKSGRQSFQAVTDHMLAIGSLDHAHIVRLLGLCPGSSLQLVTQYLPLGSLLDHVRQHRGALGPQLLLNWGVQIAKGMYYLEEHGMVHRNLAARNVLLKSPSQVQVADFGVADLLPPDDKQLLYSEAKTPIKWMALESIHFGKYTHQSDVWSYGVTVWELMTFGAEPYAGLRLAEVPDLLEKGERLAQPQICTIDVYMVMVKCWMIDENIRPTFKELANEFTRMARDPPRYLVIKRESGPGIAPGPEPHGLTNKKLEEVELEPELDLDLDLEAEEDNLATTTLGSALSLPVGTLNRPRGSQSLLSPSSGYMPMNQGNLGESCQESAVSGSSERCPRPVSLHPMPWGCLASESSEGHVTGSEAELQEKVSMCRSRSRSRSPRPRGDSAYHSQRHSLLTPVTPLSPPGLEEEDVNGYVMPDTHLKGTPSSREGTLSSVGLSSVLGTEEEDEDEEYEYMNRRRRHSPPHPPRPSSLEELGYEYMDVGSDLSASLGSTQSCPLHPVPIMPTAGTTPDEDYEYMNRQRDGGGPGGDYAAMGACPASEQGYEEMRAFQGPGHQAPHVHYARLKTLRSLEATDSAFDNPDYWHSRLFPKANAQRT

SEQ ID NO: 153 - protein, 1342 aa, Homo sapiens
MRANDALQVLGLLFSLARGSEVGNSQAVCPGTLNGLSVTGDAENQYQTLYKLYERCEVVMGNLEIVLTGHNADLSFLQWIREVTGYVLVAMNEFSTLPLPNLRVVRGTQVYDGKFAIFVMLNYNTNSSHALRQLRLTQLTEILSGGVYIEKNDKLCHMDTIDWRDIVRDRDAEIVVKDNGRSCPPCHEVCKGRCWGPGSEDCQTLTKTICAPQCNGHCFGPNPNQCCHDECAGGCSGPQDTDCFACRHFNDSGACVPRCPQPLVYNKLTFQLEPNPHTKYQYGGVCVASCPHNFVVDQTSCVRACPPDKMEVDKNGLKMCEPCGGLCPKACEGTGSGSRFQTVDSSNIDGFVNCTKILGNLDFLITGLNGDPWHKIPALDPEKLNVFRTVREITGYLNIQSWPPHMHNFSVFSNLTTIGGRSLYNRGFSLLIMKNLNVTSLGFRSLKEISAGRIYISANRQLCYHHSLNWTKVLRGPTEERLDIKHNRPRRDCVAEGKVCDPLCSSGGCWGPGPGQCLSCRNYSRGGVCVTHCNFLNGEPREFAHEAECFSCHPECQPMEGTATCNGSGSDTCAQCAHFRDGPHCVSSCPHGVLGAKGPIYKYPDVQNECRPCHENCTQGCKGPELQDCLGQTLVLIGKTHLTMALTVIAGLVVIFMMLGGTFLYWRGRRIQNKRAMRRYLERGESIEPLDPSEKANKVLARIFKETELRKLKVLGSGVFGTVHKGVWIPEGESIKIPVCIKVIEDKSGRQSFQAVTDHMLAIGSLDHAHIVRLLGLCPGSSLQLVTQYLPLGSLLDHVRQHRGALGPQLLLNWGVQIAKGMYYLEEHGMVHRNLAARNVLLKSPSQVQVADFGVADLLPPDDKQLLYSEAKTPIKWMALESIHFGKYTHQSDVWSYGVTVWELMTFGAEPYAGLRLAEVPDLLEKGERLAQPQICTIDVYMVMVKCWMIDENIRPTFKELANEFTRMARDPPRYLVIKRESGPGIAPGPEPHGLTNKKLEEVELEPELDLDLDLEAEEDNLATTTLGSALSLPVGTLNRPRGSQSLLSPSSGYMPMNQGNLGESCQESAVSGSSERCPRPVSLHPMPRGCLASESSEGHVTGSEAELQEKVSMCRSRSRSRSPRPRGDSAYHSQRHSLLTHVTPLSPPGLEEEDVNGYVMPDTHLKGTPSSREGTLSSVGLSSVLGTEEEDEDEEYEYMNRRRRHSPPHPPRPSSLEELGYEYMDVGSDLSASLGSTQSCPLHPVPIMPTAGTTPDEDYEYMNRQRDGGGPGGDYAAMGACPASEQGYEEMRAFQGPGHQAPHVHYARLKTLRSLEATDSAFDNPDYWHSRLFPKANAQRT

SEQ ID NO: 154 - protein, 1342 aa, Homo sapiens
MRANDALQVLGLLFSLARGSEVGNSQAVCPGTLNGLSVTGDAENQYQTLYKLYERCEVVMGNLEIVLTGHNADLSFLQWIREVTGYVLVAMNEFSTLPLPNLRVVRGTQVYDGKFAIFVMLNYNTNSSHALRQLRLTQLTEILSGGVYIEKNDKLCHMDTIDWRDIVRDRDAEIVVKDNGRSCPPCHEVCKGRCWGPGSEDCQTLTKTICAPQCNGHCFGPNPNQCCHDECAGGCSGPQDTDCFACRHFNDSGACVPRCPQPLVYNKLTFQLEPNPHTKYQYGGVCVASCPHNFVVDQTSCVRACPPDKMEVDKNGLKMCEPCGGLCPKACEGTGSGSRFQTVDSSNIDGFVNCTKILGNLDFLITGLNGDPWHKIPALDPEKLNVFRTVREITGYLNIQSWPPHMHNFSVFSNLTTIGGRSLYNRGFSLLIMKNLNVTSLGFRSLKEISAGRIYISANRQLCYHHSLNWTKVLRGPTEERLDIKHNRPRRDCVAEGKVCDPLCSSGGCWGPGPGQCLSCRNYSRGGVCVTHCNFLNGEPREFAHEAECFSCHPECQPMEGTATCNGSGSDTCAQCAHFRDGPHCVSSCPHGVLGAKGPIYKYPDVQNECRPCHENCTQGCKGPELQDCLGQTLVLIGKTHLTMALTVIAGLVVIFMMLGGTFLYWRGRRIQNKRAMRRYLERGESIEPLDPSEKANKVLARIFKETELRKLKVLGSGVFGTVHKGVWIPEGESIKIPVCIKVIEDKSGRQSFQAVTDHMLAIGSLDHAHIVRLLGLCPGSSLQLVTQYLPLGSLLDHVRQHRGALGPQLLLNWGVQIAKGMYYLEEHGMVHRNLAARNVLLKSPSQVQVADFGVADLLPPDDKQLLYSEAKTPIKWMALESIHFGKYTHQSDVWSYGVTVWELMTFGAEPYAGLRLAEVPDLLEKGERLAQPQICTIDVYMVMVKCWMIDENIRPTFKELANEFTRMARDPPRYLVIKRESGPGIAPGPEPHGLTNKKLEEVELEPELDLDLDLEAEEDNLATTTLGSALSLPVGTLNRPRGSQSLLSPSSGYMPMNQGNLGESCQESAVSGSSERCPRPVSLHPMPRGCLASESSEGHVTGSEAELQEKVSMCRSRSRSRSPRPRGDSAYHSQRHSLLTPVTPLSPPGLEEEDVNGYVMPDTHLKGTPSSREGTISSVGLSSVLGTEEEDEDEEYEYMNRRRRHSPPHPPRPSSLEELGYEYMDVGSDLSASLGSTQSCPLHPVPIMPTAGTTPDEDYEYMNRQRDGGGPGGDYAAMGACPASEQGYEEMRAFQGPGHQAPHVHYARLKTLRSLEATDSAFDNPDYWHSRLFPKANAQRT

SEQ ID NO: 155 - protein, 1308 aa, Homo sapiens
MKPATGLWVWVSLLVAAGTVQPSDSQSVCAGTENKLSSLSDLEQQYRALRKYYENCEVVMGNLEITSIEHNRDLSFLRSVREVTGYVLVALNQFRYLPLENLRIIRGTKLYEDRYALAIFLNYRKDGNFGLQELGLKNLTEILNGGVYVDQNKFLCYADTIHWQDIVRNPWPSNLTLVSTNGSSGCGRCHKSCTGRCWGPTENHCQTLTRTVCAEQCDGRCYGPYVSDCCHRECAGGCSGPKDTDCFACMNFNDSGACVTQCPQTFVYNPTTFQLEHNFNAKYTYGAFCVKKCPHNFVVDSSSCVRACPSSKMEVEENGIKMCKPCTDICPKACDGIGTGSLMSAQTVDSSNIDKFINCTKINGNLIFLVTGIHGDPYNAIEAIDPEKLNVFRTVREITGFLNIQSWPPNMTDFSVFSNLVTIGGRVLYSGLSLLILKQQGITSLQFQSLKEISAGNIYITDNSNLCYYHTINWTTLFSTINQRIVIRDNRKAENCTAEGMVCNHLCSSDGCWGPGPDQCLSCRRFSRGRICIESCNLYDGEFREFENGSICVECDPQCEKMEDGLLTCHGPGPDNCTKCSHFKDGPNCVEKCPDGLQGANSFIFKYADPDRECHPCHPNCTQGCNGPTSHDCIYYPWTGHSTLPQHARTPLIAAGVIGGLFILVIVGLTFAVYVRRKSIKKKRALRRFLETELVEPLTPSGTAPNQAQLRILKETELKRVKVLGSGAFGTVYKGIWVPEGETVKIPVAIKIVNETTGPKANVEFMDEALIMASMDHPHLVRLLGVCLSPTIQLVTQLMPHGCLLEYVHEHKDNIGSQLLLNWCVQIAKGMMYLEERRLVHRDLAARNVLVKSPNHVKITDFGLARLLEGDEKEYNADGGKMPIKWMALECIHYRKFTHQSDVWSYGVTIWELMTFGGKPYDGIPTREIPDLLEKGERLPQPPICTIDVYMVMVKCWMIDADSRPKFKELAAEFSRMARDPQRYLVIQGDDRMKLPSPNDSKFFQNLLDEEDLEDMMDAEEYLVPQAFNIPPPIYTSRARIDSNRSEIGHSPPPAYTPMSGNQFVYRDGGFAAEQGVSVPYRAPTSTIPEAPVAQGATAEIFDDSCCNGTLRKPVAPHVQEDSSTQRYSADPTVFAPERSPRGELDEEGYMTPMRDKPKQEYLNPVEENPFVSRRKNGDLQALDNPEYHNASNGPPKAEDEYVNEPLYLNTFANTLGKAEYLKNNILSMPEKAKKAFDNPDYWNHSLPPRSTLQHPDYLQEYSTKYFYKQNGRIRPIVAENPEYLSEFSLKPGTVLPPPPYRHRNTVV

SEQ ID NO: 156 - protein, 1308 aa, Homo sapiens
MKPATGLWVWVSLLVAAGTVQPSDSQSVCAGTENKLSSLSDLEQQYRALRKYYENCEVVMGNLEITSIEHNRDLSFLRSVREVTGYVLVALNQFRYLPLENLRIIRGTKLYEDRYALAIFLNYRKDGNFGLQELGLKNLTEILNGGVYVDQNKFLCYADTIHWQDIVRNPWPSNLTLVSTNGSSGCGRCHKSCTGRCWGPTENHCQTLTRTVCAEQCDGRCYGPYVSDCCHRECAGGCSGPKDTDCFACMNFNDSGACVTQCPQTFVYNPTTFQLEHNFNAKYTYGAFCVKKCPHNFVVDSSSCVRACPSSKMEVEENGIKMCKPCTDICPKACDGIGTGSLMSAQTVDSSNIDKFINCTKINGNLIFLVTGIHGDPYNAIEAIDPEKLNVFRTVREITGFLNIQSWPPNMTDFSVFSNLVTIGGRVLYSGLSLLILKQQGITSLQFQSLKEISAGNIYITDNSNLCYYHTINWTTLFSTINQRIVIRDNRKAENCTAEGMVCNHLCSSDGCWGPGPDQCLSCRRFSRGRICIESCNLYDGEFREFENGSICVECDPQCEKMEDGLLTCHGPGPDNCTKCSHFKDGPNCVEKCPDGLQGANSFIFKYADPDRECHPCHPNCTQGCNGPTSHDCIYYPWTGHSTLPQHARTPLIAAGVIGGLFILVIVGLTFAVYVRRKSIKKKRALRRFLETELVEPLTPSGTAPNQAQLRILKETELKRVKVLGSGAFGTVYKGIWVPEGETVKIPVAIKILNETTGPKANVEFMDEALIMASMDHPHLVRLLGVCLSPTIQLVTQLMPHGCLLEYVHEHKDNIGSQLLLNWCVQIAKGMMYLEERRLVHRDLAARNVLVKSPNHVKITDFGLARLLEGDEKEYNADGGKMPIKWMALECIHYRKFTHQSDVWSYGVTIWELMTFGGKPYDGIPTREIPDLLEKRERLPQPPICTIDVYMVMVKCWMIDADSRPKFKELAAEFSRMARDPQRYLVIQGDDRMKLPSPNDSKFFQNLLDEEDLEDMMDAEEYLVPQAFNIPPPIYTSRARIDSNRSEIGHSPPPAYTPMSGNQFVYRDGGFAAEQGVSVPYRAPTSTIPEAPVAQGATAEIFDDSCCNGTLRKPVAPHVQEDSSTQRYSADPTVFAPERSPRGELDEEGYMTPMRDKPKQEYLNPVEENPFVSRRKNGDLQALDNPEYHNASNGPPKAEDEYVNEPLYLNTFANTLGKAEYLKNNILSMPEKAKKAFDNPDYWNHSLPPRSTLQHPDYLQEYSTKYFYKQNGRIRPIVAENPEYLSEFSLKPGTVLPPPPYRHRNTVV

SEQ ID NO: 157 - protein, 1367 aa, Homo sapiens
MKSGSGGGSPTSLWGLLFLSAALSLWPTSGEICGPGIDIRNDYQQLKRLENCTVIEGYLHILLISKAEDYRSYRFPKLTVITEYLLLFRVAGLESLGDLFPNLMVIRGWKLFYNYALVIFEMTNLKDIGLYNLRNITRGAIRIEKNADLCYLSTVDWSLILDAVSNNYIVGNKPPKECGDLCPGTMEEKPMCEKTTINNEYNYRCWTTNRCQKMCPSTCGKRACTENNECCHPECLGSCSAPDNDTACVACRHYYYAGVCVPACPPNTYRFEGWRCVDRDFCANILSAESSDSEGFVIHDGECMQECPSGFIRNGSQSMYCIPCEGPCPKVCEEEKKTKTIDSVTSAQMLQGCTIFKGNLLINIRRGNNIASELENFMGLIEVVTGYVKIRHSHALVSLSFLKNLRLILGEEQLEGNYSFYVLDNQNLQQLWDWDHRNLTIKAGKMYFAFNPKLCVSEIYRMEEVTGTKGRQSKGDINTRNNGERASCESDVLHFTSTTTSKNRIIITWHRYRPPDYRDLISFTVYYKEAPFKNVTEYDGQDACGSNSWNMVDVDLPPNKDVEPGILLHGLKPWTQYAVYVKAVTLTMVENDHIRGAKSEILYIRTNASVPSIPLDVLSASNSSSQLIVKWNPPSLPNGNLSYYIVRWQRQPQDGYLYRHNYCSKDKIPIRKYADGTIDIEEVTENPKTEVCGGEKGPCCACPKTEAEKQAEKEEAEYRKVFENFLHNSIFVPRPERKRRDVMQVANTTMSSRSRNTTAADTYNITDPEELETEYPFFESRVDNKERTVISNLRPFTLYRIDIHSCNHEAEKLGCSASNFVFARTMPAEGADDIPGPVTWEPRPENSIFLKWPEPENPNGLILMYEIKYGSQVEDQRECVSRQEYRKYGGAKLNRLNPGNYTARIQATSLSGNGSWTDPVFFYVQAKTGYENFIHLIIALPVAVLLIVGGLVIMLYVFHRKRNNSRLGNGVLYASVNPEYFSAADVYVPDEWEVAREKITMSRELGQGSFGMVYEGVAKGVVKDEPETRVAIKTVNEAASMRERIEFLNEASVMKEFNCHHVVRLLGVVSQGQPTLVIMELMTRGDLKSYLRSLRPEMENNPVLAPPSLSKMIQMAGEIADGMAYLNANKFVHRDLAARNCMVAEDFTVKIGDFGMTRDIYETDYYRKGGKGLLPVRWMSPESLKDGVFTTYSDVWSFGVVLWEIATLAEQPYQGLSNEQVLRFVMEGGLLDKPDNCPDMLFELMRMCWQYNPKMRPSFLEIISSIKEEMEPGFREVSFYYSEENKLPEPEELDLEPENMESVPLDPSASSSSLPLPDRHSGHKAENGPGPGVLVLRASFDERQPYAHMNGGRKNERALPLPQSSTC

SEQ ID NO: 158 - protein, 1367 aa, Homo sapiens
MKSGSGGGSPTSLWGLLFLSAALSLWPTSGEICGPGIDIRNDYQQLKRLENCTVIEGYLHILLISKAEDYRSYRFPKLTVITEYLLLFRVAGLESLGDLFPNLTVIRGWKLFYNYALVIFEMTNLKDIGLYNLRNITRGAIRIEKNADLCYLSTVDWSLILDAVSNNYIVGNKPPKECGDLCPGTMEEKPMCEKTTINNEHNYRCWTTNRCQKMCPSTCGKRACTENNECCHPECLGSCSAPDNDTACVACRHYYYAGVCVPACPPNTYRFEGWRCVDRDFCANILSAESSDSEGFVIHDGECMQECPSGFIRNGSQSMYCIPCEGPCPKVCEEEKKTKTIDSVTSAQMLQGCTIFKGNLLINIRRGNNIASELENFMGLIEVVTGYVKIRHSHALVSLSFLKNLRLILGEEQLEGNYSFYVLDNQNLQQLWDWDHRNLTIKAGKMYFAFNPKLCVSEIYRMEEVTGTKGRQSKGDINTRNNGERASCESDVLHFTSTTTSKNRIIITWHRYRPPDYRDLISFTVYYKEAPFKNVTEYDGQDACGSNSWNMVDVDLPPNKDVEPGILLHGLKPWTQYAVYVKAVTLTMVENDHIRGAKSEILYIRTNASVPSIPLDVLSASNSSSQLIVKWNPPSLPNGNLSYYIVRWQRQPQDGYLYRHNYCSKDKIPIRKYADGTIDIEEVTENPKTEVCGGEKGPCCACPKTEAEKQAEKEEAEYRKVFENFLHNSIFVPRPERKRRDVMQVANTTMSSRSRNTTAADTYNITDPEELETEYPFFESRVDNKERTVISNLRPFTLYRIDIHSCNHEAEKLGCSASNFVFARTMPAEGADDIPGPVTWEPRPENSIFLKWPEPENPNGLILMYEIKYGSQVEDQRECVSRQEYRKYGGAKLNRLNPGNYTARIQATSLSGNGSWTDPVFFYVQAKTGYENFIHLIIALPVAVLLIVGGLVIMLYVFHRKRNNSRLGNGVLYASVNPEYFSAADVYVPDEWEVAREKITMSRELGQGSFGMVYEGVAKGVVKDEPETRVAIKTVNEAASMRERIEFLNEASVMKEFNCHHVVRLLGVVSQGQPTLVIMELMTRGDLKSYLRSLRPEMENNPVLAPPSLSKMIQMAGEIADGMAYLNANKFVHRDLAARNCMVAEDFTVKIGDFGMTRDIYETDYYRKGGKGLLPVRWMSPESLKDGVFTTYSDVWSFGVVLWEIATLAEQPYQGLSNEQVLRFVMEGGLLDKPDNCPDMLFELMRMCWQYNPKMRPSFLEIISSIKEEMEPGFREVSFYYSEENKLPEPEELDLEPENMESVPLDPSASSSSLPLPDRHSGHKAENGPGPGVLVLRASFDERQPYAHMNGGRKNERALPLPQSSTC

SEQ ID NO: 159 - protein, 1367 aa, Homo sapiens
MKSGSGGGSPTSLWGLLFLSAALSLWPTSGEICGPGIDIRNDYQQLKRLENCTVIEGYLHILLISKAEDYRSYRFPKLTVITEYLLLFRVAGLESLGDLFPNLTVIRGWKLFYNYALVIFEMTNLKDIGLYNLRNITRGAIRIEKNADLCYLSTVDWSLILDAVSNNYIVGNKPPKECGDLCPGTMEEKPMCEKTTINNEYNYRCWTTSRCQKMCPSTCGKRACTENNECCHPECLGSCSAPDNDTACVACRHYYYAGVCVPACPPNTYRFEGWRCVDRDFCANILSAESSDSEGFVIHDGECMQECPSGFIRNGSQSMYCIPCEGPCPKVCEEEKKTKTIDSVTSAQMLQGCTIFKGNLLINIRRGNNIASELENFMGLIEVVTGYVKIRHSHALVSLSFLKNLRLILGEEQLEGNYSFYVLDNQNLQQLWDWDHRNLTIKAGKMYFAFNPKLCVSEIYRMEEVTGTKGRQSKGDINTRNNGERASCESDVLHFTSTTTSKNRIIITWHRYRPPDYRDLISFTVYYKEAPFKNVTEYDGQDACGSNSWNMVDVDLPPNKDVEPGILLHGLKPWTQYAVYVKAVTLTMVENDHIRGAKSEILYIRTNASVPSIPLDVLSASNSSSQLIVKWNPPSLPNGNLSYYIVRWQRQPQDGYLYRHNYCSKDKIPIRKYADGTIDIEEVTENPKTEVCGGEKGPCCACPKTEAEKQAEKEEAEYRKVFENFLHNSIFVPRPERKRRDVMQVANTTMSSRSRNTTAADTYNITDPEELETEYPFFESRVDNKERTVISNLRPFTLYRIDIHSCNHEAEKLGCSASNFVFARTMPAEGADDIPGPVTWEPRPENSIFLKWPEPENPNGLILMYEIKYGSQVEDQRECVSRQEYRKYGGAKLNRLNPGNYTARIQATSLSGNGSWTDPVFFYVQAKTGYENFIHLIIALPVAVLLIVGGLVIMLYVFHRKRNNSRLGNGVLYASVNPEYFSAADVYVPDEWEVAREKITMSRELGQGSFGMVYEGVAKGVVKDEPETRVAIKTVNEAASMRERIEFLNEASVMKEFNCHHVVRLLGVVSQGQPTLVIMELMTRGDLKSYLRSLRPEMENNPVLAPPSLSKMIQMAGEIADGMAYLNANKFVHRDLAARNCMVAEDFTVKIGDFGMTRDIYETDYYRKGGKGLLPVRWMSPESLKDGVFTTYSDVWSFGVVLWEIATLAEQPYQGLSNEQVLRFVMEGGLLDKPDNCPDMLFELMRMCWQYNPKMRPSFLEIISSIKEEMEPGFREVSFYYSEENKLPEPEELDLEPENMESVPLDPSASSSSLPLPDRHSGHKAENGPGPGVLVLRASFDERQPYAHMNGGRKNERALPLPQSSTC

SEQ ID NO: 160 - protein, 1382 aa, Homo sapiens
MGTGGRRGAAAAPLLVAVAALLLGAAGHLYPGEVCPGMDIRNNLTRLHELENCSVIEGHLQILLMFKTRPEDFRDLSFPKLIMITDYLLLFRVYGLESLKDLFPNLTVIRGSRLFFNYALVIFEMVHLKELGLYNLMNITRGSVRIEKNNELCYLATIDWSRILDSVEDNHIVLNKDDNEECGDICPGTAKGKTNCPATVINGQFVERCWTHSHCQKVCPTICKSHGCTAEGLCCHSECLGNCSQPDDPTKCVACRNFYLDGRCVETCPPPYYHFQDWRCVNFSFCQDLHHKCKNSRRQGCHQYVIHNNKCIPECPSGYTMNSSNLLCTPCLGPCPKVCHLLEGEKTIDSVTSAQELRGCTVINGSLIINIRGGNNLAAELEANLGLIEEISGYLKIRRSYALVSLSFFRKLRLIRGETLEIGNYSFYALDNQNLRQLWDWSKHNLTTTQGKLFFHYNPKLCLSEIHKMEEVSGTKGRQERNDIALKTNGDKASCENELLKFSYIRTSFDKILLRWEPYWPPDFRDLLGFMLFYKEAPYQNVTEFDGQDACGSNSWTVVDIDPPLRSNDPKSQNHPGWLMRGLKPWTQYAIFVKTLVTFSDERRTYGAKSDIIYVQTDATNPSVPLDPISVSNSSSQIILKWKPPSDPNGNITHYLVFWERQAEDSELFELDYCLKGLKLPSRTWSPPFESEDSQKHNQSEYEDSAGECCSCPKTDSQILKELEESSFRKTFEDYLHNVVFVPRKTSSGTGAEDPRPSRKRRSLGDVGNVTVAVPTVAAFPNTSSTSVPTSPEEHRPFEKVVNKESLVISGLRHFTGYRIELQACNQDTPEERCSVAAYVSARTMPEAKADDIVGPVTHEIFENNVVHLMWQEPKEPNGLIVLYEVSYRRYGDEELHLCVSRKHFALERGCRLRGLSPGNYSVRIRATSLAGNGSWTEPTYFYVTDYLDVPSNIAKIIIGPLIFVFLFSVVIGSIYLFLRKRQPDGPLGPIYASSNPEYLSASDVFPCSVYVPDEWEVSREKITLLRELGQGSFGMVYEGNARDIIKGEAETRVAVKTVNESASLRERIEFLNEASVMKGFTCHHVVRLLGVVSKGQPTLVVMELMAHGDLKSYLRSLRPEAENNPGRPPPTLQEMIQMAAEIADGMAYLNAKKFVHRDLAARNCMVAHDFTVKIGDFGMTRDIYETDYYRKGGKGLLPVRWMAPESLKDGVFTTSSDMWSFGVVLWEITSLAEQPYQGLSNEQVLKFVMDGGYLDQPDNCPERVTDLMRMCWQFNPKMRPTFLEIVNLLKDDLHPSFPEVSFFHSEENKAPESEELEMEFEDMENVPLDRSSHCQREEAGGRDGGSSLGFKRSYEEHIPYTHMNGGKKNGRILTLPRSNPS

SEQ ID NO: 161 - protein, 620 aa, Homo sapiens
MNNFILLEEQLIKKSQQKRRTSPSNFKVRFFVLTKASLAYFEDRHGKKRTLKGSIELSRIKCVEIVKSDISIPCHYKYPFQVVHDNYLLYVFAPDRESRQRWVLALKEETRNNNSLVPKYHPNFWMDGKWRCCSQLEKLATGCAQYDPTKNASKKPLPPTPEDNRRPLWEPEETVVIALYDYQTNDPQELALRRNEEYCLLDSSEIHWWRVQDRNGHEGYVPSSYLVEKSPNNLETYEWYNKSISRDKAEKLLLDTGKEGAFMVRDSRTAGTYTVSVFTKAVVSENNPCIKHYHIKETNDNPKRYYVAEKYVFDSIPLLINYHQHNGGGLVTRLRYPVCFGRQKAPVTAGLRYGKWVIDPSELTFVQEIGSGQFGLVHLGYWLNKDKVAIKTIREGAMSEEDFIEEAEVMMKLSHPKLVQLYGVCLEQAPICLVFEFMEHGCLSDYLHTQRGLFAAETLLGMCLDVCEGMAYLEEACVIHRDLAARNCLVGENQVIKVSDFGMTRFVLDDQYTSSTGTKFPVKWASPEVFSFSRYSSKSDVWSFGVLMWEVFSEGKIPYENRSNSEVVEDISTGFRLYKPRLASTHVYQIMNHCWKERPEDRPAFSRLLRQLAEIAESGL

SEQ ID NO: 162 - protein, 1142 aa, Homo sapiens
MAFCAKMRSSKKTEVNLEAPEPGVEVIFYLSDREPLRLGSGEYTAEELCIRAAQACRISPLCHNLFALYDENTKLWYAPNRTITVDDKMSLRLHYRMRFYFTNWHGTNDNEQSVWRHSPKKQKNGYEKKKIPDATPLLDASSLEYLFAQGQYDLVKCLAPIRDPKTEQDGHDIENECLGMAVLAISHYAMMKKMQLPELPKDISYKRYIPETLNKSIRQRNLLTRMRINNVFKDFLKEFNNKTICDSSVSTHDLKVKYLATLETLTKHYGAEIFETSMLLISSENEMNWFHSNDGGNVLYYEVMVTGNLGIQWRHKPNVVSVEKEKNKLKRKKLENKDKKDEEKNKIREEWNNFSFFPEITHVVIKESVVSINKQDNKKMELKLSSHEEALSFVSLVDGYFRLTADAHHYLCTDVAPPLIVHNIQNGCHGPICTEYAINKLRQEGSEEGMYVLRWSCTDFDNILMTVTCFEKSEQVQGAQKQFKNFQIEVQKGRYSLHGSDRSFPSLGDLMSHLKKQILRTDNISFMLKRCCQPKPREISNLLVATKKAQEWQPVYPMSQLSFDRILKKDLVQGEHLGRGTRTHIYSGTLMDYKDDEGTSEEKKIKVILKVLDPSHRDISLAFFEAASMMRQVSHKHIVYLYGVCVRDVENIMVEEFVEGGPLDLFMHRKSDVLTTPWKFKVAKQLASALSYLEDKDLVHGNVCTKNLLLAREGIDSECGPFIKLSDPGIPITVLSRQECIERIPWIAPECVEDSKNLSVAADKWSFGTTLWEICYNGEIPLKDKTLIEKERFYESRCRPVTPSCKELADLMTRCMNYDPNQRPFFRAIMRDINKLEEQNPDIVSRKKNQPTEVDPTHFEKRFLKRIRDLGEGHFGKVELCRYDPEDNTGEQVAVKSLKPESGGNHIADLKKEIEILRNLYHENIVKYKGICTEDGGNGIKLIMEFLPSGSLKEYLPKNKNKINLKQQLKYAVQICKGMDYLGSRQYVHRDLAARNVLVESEHQVKIGDFGLTKAIETDKEYYTVKDDRDSPVFWYAPECLMQSKFYIASDVWSFGVTLHELLTYCDSDSSPMALFLKMIGPTHGQMTVTRLVNTLKEGKRLPCPPNCPDEVYQLMRKCWEFQPSNRTSFQNLIEGFEALLK

SEQ ID NO: 163 - protein, 1142 aa, Homo sapiens
MAFCAKMRSSKKTEVNLEAPEPGVEVIFYLSDREPLRLGSGEYTAEELCIRAAQACRISPLCHNLFALYDENTKLWYAPNRTITVDDKMSLRLHYRMRFYFTNWHGTNDNEQSVWRHSPKKQKNGYEKKKIPDATPLLDASSLEYLFAQGQYDLVKCLAPIRDPKTEQDGHDIENECLGMAVLAISHYAMMKKMQLPELPKDISYKRYIPETLNKSIRQRNLLTRMRINNVFKDFLKEFNNKTICDSSVSTHDLKVKYLATLETLTKHYGAEIFETSMLLISSENEMNWFHSNDGGNVLYYEVMVTGNLGIQWRHKPNVVSVEKEKNKLKRKKLENKDKKDEEKNKIREEWNNFSFFPEITHIVIKESVVSINKQDNKKMELKLSSHEEALSFVSLVDGYFRLTADAHHYLCTDVAPPLIVHNIQNGCHGPICTEYAINKLRQEGSEEGMYVLRWSCTDFDNILMTVTCFEKSEQVQGAQKQFKNFQIEVQKGCYSLHGSDRSFPSLGDLMSHLKKQILRTDNISFMLKRCCQPKPREISNLLVATKKAQEWQPVYPMSQLSFDRILKKDLVQGEHLGRGTRTHIYSGTLMDYKDDEGTSEEKKIKVILKVLDPSHRDISLAFFEAASMMRQVSHKHIVYLYGVCVRDVENIMVEEFVEGGPLDLFMHRKSDVLTTPWKFKVAKQLASALSYLEDKDLVHGNVCTKNLLLAREGIDSECGPFIKLSDPGIPITVLSRQECIERIPWIAPECVEDSKNLSVAADKWSFGTTLWEICYNGEIPLKDKTLIEKERFYESRCRPVTPSCKELADLMTRCMNYDPNQRPFFRAIMRDINKLEEQNPDIVSRKKNQPTEVDPTHFEKRFLKRIRDLGEGHFGKVELCRYDPEDNTGEQVAVKSLKPESGGNHIADLKKEIEILRNLYHENIVKYKGICTEDGGNGIKLIMEFLPSGSLKEYLPKNKNKINLKQQLKYAVQICKGMDYLGSRQYVHRDLAARNVLVESEHQVKIGDFGLTKAIETDKEYYTVKDDRDSPVFWYAPECLMQSKFYIASDVWSFGVTLHELLTYCDSDSSPMALFLKMIGPTHGQMTVTRLVNTLKEGKRLPCPPNCPDEVYQLMRKCWEFQPSNRTSFQNLIEGFEALLK

SEQ ID NO: 164 - protein, 863 aa, Homo sapiens
MAFCAKMRSSKKTEVNLEAPEPGVEVIFYLSDREPLRLGSGEYTAEELCIRAAQACRISPLCHNLFALYDENTKLWYAPNRTITVDDKMSLRLHYRMRFYFTNWHGTNDNEQSVWRHSPKKQKNGYEKKKIPDATPLLDASSLEYLFAQGQYDLVKCLAPIRDPKTEQDGHDIENECLGMAVLAISHYAMMKKMQLPELPKDISYKRYIPETLNKSIRQRNLLTRMRINNVFKDFLKEFNNKTICDSSVSTHDLKVKYLATLETLTKHYGAEIFETSMLLISSENEMNWFHSNDGGNVLYYEVMVTGNLGIQWRHKPNVVSVEKEKNKLKRKKLENKDKKDEEKNKIREEWNNFSFFPEITHIVIKESVVSINKQDNKKMELKLSSHEEALSFVSLVDGYFRLTADAHHYLCTDVAPPLIVHNIQNGCHGPICTEYAINKLRQEGSEEGMYVLRWSCTDFDNILMTVTCFEKSEQVQGAQKQFKNFQIEVQKGRYSLHGSDRSFPSLGDLMSHLKKQILRTDNISFMLKRCCQPKPREISNLLVATKKAQEWQPVYPMSQLSFDRILKKDLVQGEHLGRGTRTHIYSGTLMDYKDDEGTSEEKKIKVILKVLDPSHRDISLAFFEAASMMRQVSHKHIVYLYGVCVRDVENIMVEEFVEGGPLDLFMHRKSDVLTTPWKFKVAKQLASALSYLEDKDLVHGNVCTKNLLLAREGIDSECGPFIKLSDPGIPITVLSRQECIERIPWIAPECVEDSKNLSVAADKWSFGTTLWEICYNGEIPLKDKTLIEKERFYESRCRPVTPSCKELADLMTRCMNYDPNQRPFFRAIMRDINKLEEQNPDIVSRKKTSQLKWTPHILRSAS

SEQ ID NO: 165 - protein, 1132 aa, Homo sapiens
MGMACLTMTEMEGTSTSSIYQNGDISGNANSMKQIDPVLQVYLYHSLGKSEADYLTFPSGEYVAEEICIAASKACGITPVYHNMSALMSETERIWYPPNHVFHIDESTRHNVLYRIRFYFPRWYCSGSNRAYRHGISRGAEAPLLDDFVMSYLFAQWRHDFVHGWIKVPVTHETQEECLGMAVLDMMRIAKENDQTPLAIYNSISYKTFLPKCIRAKIQDYHILTRKRIRYRFRRFIQQFSQCKATARNLKLKYLINLETLQSAFYTEKFEVKEPGSGPSGEEIFATIIITGNGGIQWSRGKHKESETLTEQDLQLYCDFPNIIDVSIKQANQEGSNESRVVTIHKQDGKNLEIELSSLREALSFVSLIDGYYRLTADAHHYLCKEVAPPAVLENIQSNCHGPISMDFAISKLKKAGNQTGLYVLRCSPKDFNKYFLTFAVERENVIEYKHCLITKNENEEYNLSGTKKNFSSLKDLLNCYQMETVRSDNIIFQFTKCCPPKPKDKSNLLVFRTNGVSDVPTSPTLQRPTHMNQMVFHKIRNEDLIFNESLGQGTFTKIFKGVRREVGDYGQLHETEVLLKVLDKAHRNYSESFFEAASMMSKLSHKHLVLNYGVCVCGDENILVQEFVKFGSLDTYLKKNKNCINILWKLEVAKQLAWAMHFLEENTLIHGNVCAKNILLIREEDRKTGNPPFIKLSDPGISITVLPKDILQERIPWVPPECIENPKNLNLATDKWSFGTTLWEICSGGDKPLSALDSQRKLQFYEDRHQLPAPKWAELANLINNCMDYEPDFRPSFRAIIRDLNSLFTPDYELLTENDMLPNMRIGALGFSGAFEDRDPTQFEERHLKFLQQLGKGNFGSVEMCRYDPLQDNTGEVVAVKKLQHSTEEHLRDFEREIEILKSLQHDNIVKYKGVCYSAGRRNLKLIMEYLPYGSLRDYLQKHKERIDHIKLLQYTSQICKGMEYLGTKRYIHRDLATRNILVENENRVKIGDFGLTKVLPQDKEYYKVKEPGESPIFWYAPESLTESKFSVASDVWSFGVVLYELFTYIEKSKSPPAEFMRMIGNDKQGQMIVFHLIELLKNNGRLPRPDGCPDEIYMIMTECWNNNVNQRPSFRDLALRVDQIRDNMAG

SEQ ID NO: 166 - protein, 1132 aa, Homo sapiens
MGMACLTMTEMEGTSTSSIYQNGDISGNANSMKQIDPVLQVYLYHSLGKSEADYLTFPSGEYVAEEICIAASKACGITPVYHNMFALMSETERIWYPPNHVFHIDESTRHNVLYRIRFYFPRWYCSGSNRAYRHGISRGAEAPLLDDFVMSYLFAQWRHDFVHGWIKVPVTHETQEECLGMAVLDMMRIAKENDQTPLAIYNSISYKTFLPKCIRAKIQDYHILTRKRIRYRFRRFIQQFSQCKATARNLKLKYLINLETLQSAFYTEKFEVKEPGSGPSGEEIFATIIITGNGGIQWSRGKHKESETLTEQDLQLYCDFPNIIDVSIKQANQEGSNESRVVTIHKQDGKNLEIELSSLREALSFVSLIDGYYRLTEDAHHYLCKEVAPPAVLENIQSNCHGPISMDFAISKLKKAGNQTGLYVLRCSPKDFNKYFLTFAVERENVIEYKHCLITKNENEEYNLSGTKKNFSSLKDLLNCYQMETVRSDNIIFQFTKCCPPKPKDKSNLLVFRTNGVSDVPTSPTLQRPTHMNQMVFHKIRNEDLIFNESLGQGTFTKIFKGVRREVGDYGQLHETEVLLKVLDKAHRNYSESFFEAASMMSKLSHKHLVLNYGVCVCGDENILVQEFVKFGSLDTYLKKNKNCINILWKLEVAKQLAWAMHFLEENTLIHGNVCAKNILLIREEDRKTGNPPFIKLSDPGISITVLPKDILQERIPWVPPECIENPKNLNLATDKWSFGTTLWEICSGGDKPLSALDSQRKLQFYEDRHQLPAPKWAELANLINNCMDYEPDFRPSFRAIIRDLNSLFTPDYELLTENDMLPNMRIGALGFSGAFEDRDPTQFEERHLKFLQQLGKGNFGSVEMCRYDPLQDNTGEVVAVKKLQHSTEEHLRDFEREIEILKSLQHDNIVKYKGVCYSAGRRNLKLIMEYLPYGSLRDYLQKHKERIDHIKLLQYTSQICKGMEYLGTKRYIHRDLATRNILVENENRVKIGDFGLTKVLPQDKEYYKVKEPGESPIFWYAPESLTESKFSVASDVWSFGVVLYELFTYIEKSKSPPAEFMRMIGNDKQGQMIVFHLIELLKNNGRLPRPDGCPDEIYMIMTECWNNNVNQRPSFRDLALRVDQIRDNMAG

SEQ ID NO: 167 - protein, 1132 aa, Homo sapiens
MGMACLTMTEMEGTSTSSIYQNGDISGNANSMKQIDPVLQVYLYHSLGKSEADYLTFPSGEYVAEEICIAASKACGITPVYHNMFALMSETERIWYPPNHVFHIDESTRHNVLYRIRFYFPRWYCSGSNRAYRHGISRGAEAPLLDDFVMSYLFAQWRHDFVHGWIKVPVTHETQEECLGMAVLDMMRIAKENDQTPLAIYNSISYKTFLPKCIRAKIQDYHILTRKRIRYRFRRFIQQFSQCKATARNLKLKYLINLETLQSAFYTEKFEVKEPGSGPSGEEIFATIIITGNGGIQWSRGKHKESETLTEQDLQLYCDFPNIIDVSIKQANQEGSNESRVVTIHKQDGKNLEIELSSLREALSFVSLIDGYYRLTADAHHYPCKEVAPPAVLENIQSNCHGPISMDFAISKLKKAGNQTGLYVLRCSPKDFNKYFLTFAVERENVIEYKHCLITKNENEEYNLSGTKKNFSSLKDLLNCYQMETVRSDNIIFQFTKCCPPKPKDKSNLLVFRTNGVSDVPTSPTLQRPTHMNQMVFHKIRNEDLIFNESLGQGTFTKIFKGVRREVGDYGQLHETEVLLKVLDKAHRNYSESFFEAASMMSKLSHKHLVLNYGVCVCGDENILVQEFVKFGSLDTYLKKNKNCINILWKLEVAKQLAWAMHFLEENTLIHGNVCAKNILLIREEDRKTGNPPFIKLSDPGISITVLPKDILQERIPWVPPECIENPKNLNLATDKWSFGTTLWEICSGGDKPLSALDSQRKLQFYEDRHQLPAPKWAELANLINNCMDYEPDFRPSFRAIIRDLNSLFTPDYELLTENDMLPNMRIGALGFSGAFEDRDPTQFEERHLKFLQQLGKGNFGSVEMCRYDPLQDNTGEVVAVKKLQHSTEEHLRDFEREIEILKSLQHDNIVKYKGVCYSAGRRNLKLIMEYLPYGSLRDYLQKHKERIDHIKLLQYTSQICKGMEYLGTKRYIHRDLATRNILVENENRVKIGDFGLTKVLPQDKEYYKVKEPGESPIFWYAPESLTESKFSVASDVWSFGVVLYELFTYIEKSKSPPAEFMRMIGNDKQGQMIVFHLIELLKNNGRLPRPDGCPDEIYMIMTECWNNNVNQRPSFRDLALRVDQIRDNMAG

SEQ ID NO: 168 - protein, 1132 aa, Homo sapiens [sequence omitted]

SEQ ID NO: 169 - protein, 1132 aa, Homo sapiens [sequence omitted]

SEQ ID NO: 170 - protein, 1132 aa, Homo sapiens [sequence omitted]

SEQ ID NO: 171 - protein, 1132 aa, Homo sapiens
MGMACLTMTEMEGTSTSSIYQNGDISGNANSMKQIDPVLQVYLYHSLGKSEADYLTFPSGEYVAEEICIAASKACGITPVYHNMFALMSETERIWYPPNHVFHIDESTRHNVLYRIRFYFPRWYCSGSNRAYRHGISRGAEAPLLDDFVMSYLFAQWRHDFVHGWIKVPVTHETQEECLGMAVLDMMRIAKENDQTPLAIYNSISYKTFLPKCIRAKIQDYHILTRKRIRYRFRRFIQQFSQCKATARNLKLKYLINLETLQSAFYTEKFEVKEPGSGPSGEEIFATIIITGNGGIQWSRGKHKESETLTEQDLQLYCDFPNIIDVSIKQANQEGSNESRVVTIHKQDGKNLEIELSSLREALSFVSLIDGYYRLTADAHHYLCKEVAPPAVLENIQSNCHGPISMDFAISKLKKAGNQTGLYVLRCSPKDFNKYFLTFAVERENVIEYKHCLITKNENEEYNLSGTKKNFSSLKDLLNCYQMETVRSDNIIFQFTKCCPPKPKDKSNLLVFRTNGVSDVPTSPTLQRPTHMNQMVFHKIRNEDLIFNESLGQGTFTKIFKGVRREVGDYGQLHETEVLLKVLDKAHRNYSESFFEAASMMSKLSHKHLVLNYGVCVCGDENILVQEFVKFGSLDTYLKKNKNCINILWKLEVAKQLAWAMHFLEENTLIHGNVCAKNILLIREEDRKTGNPPFIKLSDPGISITVLPKDILQERIPWVPPECIENPKNLNLATDKWSFGTTLWEICSGGDKPLSALDSQRKLQFYEDRHQLPAPKWAELANLINNCMDYEPDFRPSFRAIIRDLNSLFTPDYELLTENDMLPNMRIGALGFSGAFEDRDPTQFEERHLKFLQQLGKGNFGSVEMCRYDPLQDNTGEVVAVKKLQHSTEEHLRDFEREIEILKSLQHDNIVKYKGVCYSAGRRNLKLIMEYLPYGSLRDYLQKHKERIDHIKLLQYTSQICKGMEYLGTKRYIHRDLATRNILVENENRVKIGDFGLTKVLPQDKEYYKVKEPGESPIFWYAPESLTESKFSVASDVWSFGVVLYELFTYIEKSKSPPAEFMRMIGNDKQGQMIVFHLIELLKNNGRLPRPDGCPDEIYMIMTECWNSNVNQRPSFRDLALRVDQIRDNMAG

SEQ ID NO: 172 - protein, 104 aa, Homo sapiens
MAPPSEETPLIPQRSCSLLSTEAGALHVLLPARGPGPPQRLSFSFGDHLAEDLCVQAAKASAFTSPIGLGWRSATASGYARIWPVLSLTCQSWSTSLPSTAVTW

SEQ ID NO: 173 - protein, 1124 aa, Homo sapiens
MAPPSEETPLIPQRSCSLLSTEAGALHVLLPARGPGPPQRLSFSFGDHLAEDLCVQAAKASGILPVYHSLFALATEDLSCWFPPSHIFSVEDASTQVLLYRIRFYFPNWFGLEKCHRFGLRKDLASAILDLPVLEHLFAQHRSDLVSGRLPVGLSLKEQGECLSLAVLDLARMAREQAQRPGELLKTVSYKACLPPSLRDLIQGLSFVTRRRIRRTVRRALRRVAACQADRHSLMAKYIMDLERLDPAGAAETFHVGLPGALGGHDGLGLLRVAGDGGIAWTQGEQEVLQPFCDFPEIVDISIKQAPRVGPAGEHRLVTVTRTDNQILEAEFPGLPEALSFVALVDGYFRLTTDSQHFFCKEVAPPRLLEEVAEQCHGPITLDFAINKLKTGGSRPGSYVLRRSPQDFDSFLLTVCVQNPLGPDYKGCLIRRSPTGTFLLVGLSRPHSSLRELLATCWDGGLHVDGVAVTLTSCCIPRPKEKSNLIVVQRGHSPPTSSLVQPQSQYQLSQITFHKIPADSLEWHENLGHGSFTKIYRGCRHEVVDGEARKTEVLLKVMDAKHKNCMESFLEAASLMSQVSYRHLVLLHGVCMAGDSTMVQEFVHLGAIDMYLRKRGHLVPASWKLQVVKQLAYALNYLEDKGLPHGNVSARKVLLAREGADGSPPFIKLSDPGVSPAVLSLEMLTDRIPWVAPECLREAQTLSLEADKWGFGATVWEVFSGVTMPISALDPAKKLQFYEDRQQLPAPKWTELALLIQQCMAYEPVQRPSFRAVIRDLNSLISSDYELLSDPTPGALAPRDGLWNGAQLYACQDPTIFEERHLKYISQLGKGNFGSVELCRYDPLGDNTGALVAVKQLQHSGPDQQRDFQREIQILKALHSDFIVKYRGVSYGPGRQSLRLVMEYLPSGCLRDFLQRHRARLDASRLLLYSSQICKGMEYLGSRRCVHRDLAARNILVESEAHVKIADFGLAKLLPLDKDYYVVREPGQSPIFWYAPESLSDNIFSRQSDVWSFGVVLYELFTYCDKSCSPSAEFLRMMGCERDVPALCRLLELLEEGQRLPAPPACPAEVHELMKLCWAPSPQDRPSFSALGPQLDMLWSGSRGCETHAFTAHPEGKHHSLSFS

SEQ ID NO: 174 - protein, 1124 aa, Homo sapiens
MAPPSEETPLIPQRSCSLLSTEAGALHVLLPARGPGPPQRLSFSFGDHLAEDLCVQAAKASGILPVYHSLFALATEDLSCWFPPSHIFSVEDASTQVLLYRIRFYFPNWFGLEKCHRFGLRKDLASAILDLPVLEHLFAQHRSDLVSGRLPVGLSLKEQGECLSLAVLDLARMAREQAQRPGELLKTVSYKACLPPSLRDLIQGLSFVTRRRIRRTVRRALRRVAACQADRHSLMAKYIMDLERLDPAGAAETFHVGLPGALGGHDGLGLLRVAGDGGIAWTQGEQEVLQPFCDFPEIVDISIKQAPRVGPAGEHRLVTVTRTDNQILEAEFPGLPEALSFVALVDGYFRLTTDSQHFFCKEVAPPRLLEEVAEQCHGPITLDFAINKLKTGGSRPGSYVLRRSPQDFDSFLLTVCVQNPLGPDYKGCLIRRSPTGTFLLVGLSRPHSSLRELLATCWDGGLHVDGVAVTLTSCCIPRPKEKSNLIVVQRGHSPPTSSLVQPQSQYQLSQMTFHKIPADSLEWHENLGHGSFTKIYRGCRHEVVDGEARKTEVLLKVMDAKHKNCMESFLEAASLMSQVSYRHLVLLHGVCMAGDSTMVQEFVHLGAIDMYLRKRGHLVPASWKLQVVKQLAYALNYLEDKGLPHGNVSARKVLLAREGADGSPPFIKLSDPGVSPAVLSLEMLTDRIPWVALECLREAQTLSLEADKWGFGATVWEVFSGVTMPISALDPAKKLQFYEDRQQLPAPKWTELALLIQQCMAYEPVQRPSFRAVIRDLNSLISSDYELLSDPTPGALAPRDGLWNGAQLYACQDPTIFEERHLKYISQLGKGNFGSVELCRYDPLGDNTGALVAVKQLQHSGPDQQRDFQREIQILKALHSDFIVKYRGVSYGPGRQSLRLVMEYLPSGCLRDFLQRHRARLDASRLLLYSSQICKGMEYLGSRRCVHRDLAARNILVESEAHVKIADFGLAKLLPLDKDYYVVREPGQSPIFWYAPESLSDNIFSRQSDVWSFGVVLYELFTYCDKSCSPSAEFLRMMGCERDVPALCRLLELLEEGQRLPAPPACPAEVHELMKLCWAPSPQDRPSFSALGPQLDMLWSGSRGCETHAFTAHPEGKHHSLSFS

SEQ ID NO: 175 - protein, 1124 aa, Homo sapiens
MAPPSEETPLIPQRSCSLLSTEAGALHVLLPARGPGPPQRLSFSFGDHLAEDLCVQAAKASGILPVYHSLFALATEDLSCWFPPSHIFSVEDASTQVLLYRIRFYFPNWFGLEKCHRFGLRKDLASAILDLPVLEHLFAQHRSDLVSGRLPVGLSLKEQGECLSLAVLDLARMAREQAQRPGELLKTVSYKACLPPSLRDLIQGLSFVTRRRIRRTVRRALRRVAACQADRHSLMAKYIMDLERLDPAGAAETFHVGLPGALGGHDGLGLLRVAGDGGIAWTQGEQEVLQPFCDFPEIVDISIKQAPRVGPAGEHRLVTVTRTDNQILEAEFPGLPEALSFVALVDGYFRLTTDSQHFFCKEVAPPRLLEEVAEQCHGPITLDFAINKLKTGGSRPGSYVLRRSPQDFDSFLLTVCVQNPLGPDYKGCLIRRSPTGTFLLVGLSRPHSSLRELLATCWDGGLHVDGVAVTLTSCCIPRPKEKSNLIVVQRGHSPPTSSLVQPQSQYQLSQMTFHKIPADSLEWHENLGHGSFTKIYRGCRHEVVDGEARKTEVLLKVMDAKHKNCMESFLEAASLMSQVSYRHLVLLHGVCMAGDSTMVQEFVHLGAIDMYLRKRGHLVPASWKLQVVKQLAYALNYLEDKGLPHGNVSARKVLLAREGADGSPPFIKLSDPGVSPAVLSLEMLTDRIPWVAPECLRKAQTLSLEADKWGFGATVWEVFSGVTMPISALDPAKKLQFYEDRQQLPAPKWTELALLIQQCMAYEPVQRPSFRAVIRDLNSLISSDYELLSDPTPGALAPRDGLWNGAQLYACQDPTIFEERHLKYISQLGKGNFGSVELCRYDPLGDNTGALVAVKQLQHSGPDQQRDFQREIQILKALHSDFIVKYRGVSYGPGRQSLRLVMEYLPSGCLRDFLQRHRARLDASRLLLYSSQICKGMEYLGSRRCVHRDLAARNILVESEAHVKIADFGLAKLLPLDKDYYVVREPGQSPIFWYAPESLSDNIFSRQSDVWSFGVVLYELFTYCDKSCSPSAEFLRMMGCERDVPALCRLLELLEEGQRLPAPPACPAEVHELMKLCWAPSPQDRPSFSALGPQLDMLWSGSRGCETHAFTAHPEGKHHSLSFS

SEQ ID NO: 176 - protein, 42 aa, Homo sapiens
MGCGCSSHPEDDWMENIDVCENCHYPIVPLDGKGTGDGPLGG

SEQ ID NO: 177 - protein, 509 aa, Homo sapiens
MGCGCSSHPEDDWMENIDVCENCHYPIVPLDGKGTLLIRNGSEVRDPLVTYEGSNPPASPLQDNLVIALHSYEPSHDGDLGFEKGEQLRILEQSGEWWKAQSLTTGQEGFIPFNFVAKANSLEPEPWFFKNLSRKDAERQLLAPGNTHGSSLIRESESTAGSFSLSVRDFDQNQGEVVKHYKIRNLDNGGFYISPRITFPGLHELVRHYTNASDGLCTRLSRPCQTQKPQKPWWEDEWEVPRETLKLVERLGAGQFGEVWMGYYNGHTKVAVKSLKQGSMSPDAFLAEANLMKQLQHQRLVRLYAVVTQEPIYIITEYMENGSLVDFLKTPSGIKLTINKLLDMAAQIAEGMAFIEERNYIHRDLRAANILVSDTLSCKIADFGLARLIEDNEYTAREGAKFPIKWTAPEAINYGTFTIKSDVWSFGILLTEIVTHGRIPYPGMTNPEVIQNLERGYRMVRPDNCPEELYQLMRLCWKERPEDRPTFDYLRSVLEDFFTATEGQYQPQP

SEQ ID NO: 178 - protein, 509 aa, Homo sapiens
MGCGCSSHPEDDWMENIDVCENCHYPIVPLDGKGTLLIRNGSEVRDPLVTYEGSNPPASPLQDNLVIALHSYEPSHDGDLGFEKGEQLRILEQSGEWWKAQSLTTGQEGFIPFNFVAKANSLEPEPWFFKNLSRKDAERQLLAPGNTHGSFLIRESESTAGSFSLSVRDFDQNQGEVVKHYKIRNLDNGGFYISPRITFPGLHELVRHYTNASDGLCTRLSRPCQTQKPQKPWWEDEWEVPRETLKLVERLGAGQFGEVWMGYYNGHTKVAVKSLKQGSMSPDAFLAEANLMKQLQHQRLVRLYAVVTQEPIYIITEYMENGSLVDFLKTPSGIKLTINKLLDMAAQIAEGMAFIEERNYIHRDLRAANILVSDTLSCKIADFGLARLIEDNEYTAREGAKFPIKWTAPEAINYGTFTIKSDVWSFGILLTEIVTHGRIPYPGMTNPEVIQNLERGYRMVRPDNCPEELYQLMRLCWKERPEDWPTFDYLRSVLEDFFTATEGQYQPQP

SEQ ID NO: 179 - protein, 1503 aa, Homo sapiens
MPGPPALRRRLLLLLLVLLIAGSAGAAPLPQTGAGEAPPAAEVSSSFVILCVCSLIILIVLIANCVSCCKDPEIDFKEFEDNFDDEIDFTPPAEDTPSVQSPAEVFTLSVPNISLPAPSQFQPSVEGLKSQVARHSLNYIQEIGNGWFGKVLLGEIYTGTSVARVIVKELKASANPKEQDTFLKNGEPYYILQHPNILQCVGQCVEAIPYLLVFEFCDLGDLKAYLRSEQEHMRGDSPTMLLQRMACEVAAGLAAMHKLHFLHSDLALRNCFLTSDLNVKVGDYGIGFSRYKEDYIETDDKKVFPLRWTAPELVTSFQDRLLTADQTKYSNIWSLGVTLWELFDNAAQPYSNLSNLDVLNQVIRERDTKLPKPQLEQPYSDRWYEVLQFCWLSPEKRPAAEDVHRLLTYLRLQSQRDSEVDFEQQWNALKPNTNSRDSSNNAAFPILDHFARDRLGREMEEVLTVTETSQGLSFEYVWEAAKHDHFDERSRGHLDEGLSYTSIFYPVEVFESSLSDPGPGKQDDSGQDVPLRVPGVVPVFDAHNLSVGSDYYIQLEEKSGSNLELDYPPALLTTDMDNPERTGPELSQLTALRSVELEESSTDEDFFQSSTDPKDSSLPGDLHVTSGPESPFNNIFNDVDKSEDLPSHQKIFDLMELNGVQADFKPATLSSSLDNPKESVITGHFEKEKPRKIFDSEPLCLSDNLMHQDNFDPLNVQELSENFLFLQEKNLLKGSLSSKEHINDLQTELKNAGFTEAMLETSCRNSLDTELQFAENKPGLSLLQENVSTKGDDTDVMLTGDTLSTSLQSSPEVQVPPTSFETEETPRRVPPDSLPTQGETQPTCLDVIVPEDCLHQDISPDAVTVPVEILSTDARTHSLDNRSQDSPGESEETLRLTESDSVLADDILASRVSVGSSLPELGQELHNKPFSEDHHSHRRLEKNLEAVETLNQLNSKDAAKEAGLVSALSSDSTSQDSLLEDSLSAPFPASEPSLETPDSLESVDVHEALLDSLGSHTPQKLVPPDKPADSGYETENLESPEWTLHPAPEGTADSEPATTGDGGHSGLPPNPVIVISDAGDGHRGTEVTPETFTAGSQGSYRDSAYFSDNDSEPEKRSEEVPGTSPSALVLVQEQPLPEPVLPEQSPAAQDSCLEARKSQPDESCLSALHNSSDLELRATPEPAQTGVPQQVHPTEDEASSPWSVLNAELSSGDDFETQDDRPCTLASTGTNTNELLAYTNSALDKSLSSHSEGPKLKEPDIEGKYLGKLGVSGMLDLSEDGMDADEEDENSDDSDEDLRAFNLHSLSSESEDETEHPVPIILSNEDGRHLRSLLKPTAANAPDPLPEDWKKEKKAVTFFDDVTVYLFDQETPTKELGPCGGEACGPDLSGPAPASGSPYLSRCINSESSTDEEGGGFEWDDDFSPDPFMSKTTSNLLSSKPSLQTSKYFSPPPPARSTEQSWPHSAPYSRFSISPANIASFSLTHLTDSDIEQGGSSEDGEKD

SEQ ID NO: 180 - protein, 1503 aa, Homo sapiens
MPGPPALRRRLLLLLLVLLIAGSAGAAPLPQTGAGEAPPAAEVSSSFVILCVCSLIILIVLIANCVSCCKDPEIDFKEFEDNFDDEIDFTPPAEDTPSVQSPAEVFTLSVPNISLPAPSQFQPSVEGLKSQVARHSLNYIQEIGNGWFGKVLLGEIYTGTSVARVIVKELKASANPKEQDTFLKNGEPYYILQHPNILQCVGQCVEAIPYLLVFEFCDLGDLKAYLRSEQEHMRGDSQTMLLQRMACEVATGLAAMHKLHFLHSDLALRNCFLTSDLNVKVGDYGIGFSRYKEDYIETDDKKVFPLRWTAPELVTSFQDRLLTADQTKYSNIWSLGVTLWELFDNAAQPYSNLSNLDVLNQVIRERDTKLPKPQLEQPYSDRWYEVLQFCWLSPEKRPAAEDVHRLLTYLRLQSQRDSEVDFEQQWNALKPNTNSRDSSNNAAFPILDHFARDRLGREMEEVLTVTETSQGLSFEYVWEAAKHDHFDERSRGHLDEGLSYTSIFYPVEVFESSLSDPGPGKQDDSGQDVPLRVPGVVPVFDAHNLSVGSDYYIQLEEKSGSNLELDYPPALLTTDMDNPERTGPELSQLTALRSVELEESSTDEDFFQSSTDPKDSSLPGDLHVTSGPESPFNNIFNDVDKSEDLPSHQKIFDLMELNGVQADFKPATLSSSLDNPKESVITGHFEKEKPRKIFDSEPLCLSDNLMHQDNFDPLNVQELSENFLFLQEKNLLKGSLSSKEHINDLQTELKNAGFTEAMLETSCRNSLDTELQFAENKPGLSLLQENVSTKGDDTDVMLTGDTLSTSLQSSPEVQVPPTSFETEETPRRVPPDSLPTQGETQPTCLDVIVPEDCLHQDISPDAVTVPVEILSTDARTHSLDNRSQDSPGESEETLRLTESDSVLADDILASRVSVGSSLPELGQELHNKPFSEDHHSHRRLEKNLEAVETLNQLNSKDAAKEAGLVSALSSDSTSQDSLLEDSLSAPFPASEPSLETPDSLESVDVHEALLDSLGSHTPQKLVPPDKPADSGYETENLESPEWTLHPAPEGTADSEPATTGDGGHSGLPPNPVIVISDAGDGHRGTEVTPETFTAGSQGSYRDSAYFSDNDSEPEKRSEEVPGTSPSALVLVQEQPLPEPVLPEQSPAAQDSCLEARKSQPDESCLSALHNSSDLELRATPEPAQTGVPQQVHPTEDEASSPWSVLNAELSSGDDFETQDDRPCTLASTGTNTNELLAYTNSALDKSLSSHSEGPKLKEPDIEGKYLGKLGVSGMLDLSEDGMDADEEDENSDDSDEDLRAFNLHSLSSESEDETEHPVPIILSNEDGRHLRSLLKPTAANAPDPLPEDWKKEKKAVTFFDDVTVYLFDQETPTKELGPCGGEACGPDLSGPAPASGSPYLSRCINSESSTDEEGGGFEWDDDFSPDPFMSKTTSNLLSSKPSLQTSKYFSPPPPARSTEQSWPHSAPYSRFSISPANIASFSLTHLTDSDIEQGGSSEDGEKD

SEQ ID NO: 181 - protein, 1503 aa, Homo sapiens
MPGPPALRRRLLLLLLVLLIAGSAGAAPLPQTGAGEAPPAAEVSSSFVILCVCSLIILIVLIANCVSCCKDPEIDFKEFEDNFDDEIDFTPPAEDTPSVQSPAEVFTLSVPNISLPAPSQFQPSVEGLKSQVARHSLNYIQEIGNGWFGKVLLGEIYTGTSVARVIVKELKASANPKEQDTFLKNGEPYYILQHPNILQCVGQCVEAIPYLLVFEFCDLGDLKAYLRSEQEHMRGDSQTMLLQRMACEVAAGLAAMHKLHFLHSDLALRNCFLTSDLNVKVGDYGIGFSRYKEDYIETDDKKVFPLRWTAPELVTSFQDRLLTADQTKYSNIWSLGVTLWELFDNAAQPYSNLSNLDVLNQVIRERDTKLPKPQLEQPYSDRWYEVLQFCWLSPEKRPAAEDVHRLLTYLRLQSQRDSEVDFEQQWNALKPNTNSRDSSNNAAFPILDHFARDRLGREMEEVLTVTETSQGLSFEYVWEAAKHDHFDERSRGHLDEGLSYTSIFYPVEVFESSLSDPVPGKQDDSGQDVPLRVPGVVPVFDAHNLSVGSDYYIQLEEKSGSNLELDYPPALLTTDMDNPERTGPELSQLTALRSVELEESSTDEDFFQSSTDPKDSSLPGDLHVTSGPESPFNNIFNDVDKSEDLPSHQKIFDLMELNGVQADFKPATLSSSLDNPKESVITGHFEKEKPRKIFDSEPLCLSDNLMHQDNFDPLNVQELSENFLFLQEKNLLKGSLSSKEHINDLQTELKNAGFTEAMLETSCRNSLDTELQFAENKPGLSLLQENVSTKGDDTDVMLTGDTLSTSLQSSPEVQVPPTSFETEETPRRVPPDSLPTQGETQPTCLDVIVPEDCLHQDISPDAVTVPVEILSTDARTHSLDNRSQDSPGESEETLRLTESDSVLADDILASRVSVGSSLPELGQELHNKPFSEDHHSHRRLEKNLEAVETLNQLNSKDAAKEAGLVSALSSDSTSQDSLLEDSLSAPFPASEPSLETPDSLESVDVHEALLDSLGSHTPQKLVPPDKPADSGYETENLESPEWTLHPAPEGTADSEPATTGDGGHSGLPPNPVIVISDAGDGHRGTEVTPETFTAGSQGSYRDSAYFSDNDSEPEKRSEEVPGTSPSALVLVQEQPLPEPVLPEQSPAAQDSCLEARKSQPDESCLSALHNSSDLELRATPEPAQTGVPQQVHPTEDEASSPWSVLNAELSSGDDFETQDDRPCTLASTGTNTNELLAYTNSALDKSLSSHSEGPKLKEPDIEGKYLGKLGVSGMLDLSEDGMDADEEDENSDDSDEDLRAFNLHSLSSESEDETEHPVPIILSNEDGRHLRSLLKPTAANAPDPLPEDWKKEKKAVTFFDDVTVYLFDQETPTKELGPCGGEACGPDLSGPAPASGSPYLSRCINSESSTDEEGGGFEWDDDFSPDPFMSKTTSNLLSSKPSLQTSKYFSPPPPARSTEQSWPHSAPYSRFSISPANIASFSLTHLTDSDIEQGGSSEDGEKD

SEQ ID NO: 182 - protein, 1503 aa, Homo sapiens
MPGPPALRRRLLLLLLVLLIAGSAGAAPLPQTGAGEAPPAAEVSSSFVILCVCSLIILIVLIANCVSCCKDPEIDFKEFEDNFDDEIDFTPPAEDTPSVQSPAEVFTLSVPNISLPAPSQFQPSVEGLKSQVARHSLNYIQEIGNGWFGKVLLGEIYTGTSVARVIVKELKASANPKEQDTFLKNGEPYYILQHPNILQCVGQCVEAIPYLLVFEFCDLGDLKAYLRSEQEHMRGDSQTMLLQRMACEVAAGLAAMHKLHFLHSDLALRNCFLTSDLNVKVGDYGIGFSRYKEDYIETDDKKVFPLRWTAPELVTSFQDRLLTADQTKYSNIWSLGVTLWELFDNAAQPYSNLSNLDVLNQVIRERDTKLPKPQLEQPYSDRWYEVLQFCWLSPEKRPAAEDVHRLLTYLRLQSQRDSEVDFEQQWNALKPNTNSRDSSNNAAFPILDHFARDRLGREMEEVLTVTETSQGLSFEYVWEAAKHDHFDERSRGHLDEGLSYTSIFYPVEVFESSLSDPGPGKQYDSGQDVPLRVPGVVPVFDAHNLSVGSDYYIQLEEKSGSNLELDYPPALLTTDMDNPERTGPELSQLTALRSVELEESSTDEDFFQSSTDPKDSSLPGDLHVTSGPESPFNNIFNDVDKSEDLPSHQKIFDLMELNGVQADFKPATLSSSLDNPKESVITGHFEKEKPRKIFDSEPLCLSDNLMHQDNFDPLNVQELSENFLFLQEKNLLKGSLSSKEHINDLQTELKNAGFTEAMLETSCRNSLDTELQFAENKPGLSLLQENVSTKGDDTDVMLTGDTLSTSLQSSPEVQVPPTSFETEETPRRVPPDSLPTQGETQPTCLDVIVPEDCLHQDISPDAVTVPVEILSTDARTHSLDNRSQDSPGESEETLRLTESDSVLADDILASRVSVGSSLPELGQELHNKPFSEDHHSHRRLEKNLEAVETLNQLNSKDAAKEAGLVSALSSDSTSQDSLLEDSLSAPFPASEPSLETPDSLESVDVHEALLDSLGSHTPQKLVPPDKPADSGYETENLESPEWTLHPAPEGTADSEPATTGDGGHSGLPPNPVIVISDAGDGHRGTEVTPETFTAGSQGSYRDSAYFSDNDSEPEKRSEEVPGTSPSALVLVQEQPLPEPVLPEQSPAAQDSCLEARKSQPDESCLSALHNSSDLELRATPEPAQTGVPQQVHPTEDEASSPWSVLNAELSSGDDFETQDDRPCTLASTGTNTNELLAYTNSALDKSLSSHSEGPKLKEPDIEGKYLGKLGVSGMLDLSEDGMDADEEDENSDDSDEDLRAFNLHSLSSESEDETEHPVPIILSNEDGRHLRSLLKPTAANAPDPLPEDWKKEKKAVTFFDDVTVYLFDQETPTKELGPCGGEACGPDLSGPAPASGSPYLSRCINSESSTDEEGGGFEWDDDFSPDPFMSKTTSNLLSSKPSLQTSKYFSPPPPARSTEQSWPHSAPYSRFSISPANIASFSLTHLTDSDIEQGGSSEDGEKD

SEQ ID NO: 183 - protein, 1503 aa, Homo sapiens
MPGPPALRRRLLLLLLVLLIAGSAGAAPLPQTGAGEAPPAAEVSSSFVILCVCSLIILIVLIANCVSCCKDPEIDFKEFEDNFDDEIDFTPPAEDTPSVQSPAEVFTLSVPNISLPAPSQFQPSVEGLKSQVARHSLNYIQEIGNGWFGKVLLGEIYTGTSVARVIVKELKASANPKEQDTFLKNGEPYYILQHPNILQCVGQCVEAIPYLLVFEFCDLGDLKAYLRSEQEHMRGDSQTMLLQRMACEVAAGLAAMHKLHFLHSDLALRNCFLTSDLNVKVGDYGIGFSRYKEDYIETDDKKVFPLRWTAPELVTSFQDRLLTADQTKYSNIWSLGVTLWELFDNAAQPYSNLSNLDVLNQVIRERDTKLPKPQLEQPYSDRWYEVLQFCWLSPEKRPAAEDVHRLLTYLRLQSQRDSEVDFEQQWNALKPNTNSRDSSNNAAFPILDHFARDRLGREMEEVLTVTETSQGLSFEYVWEAAKHDHFDERSRGHLDEGLSYTSIFYPVEVFESSLSDPGPGKQDDSGQDVPLRVPGVVPVFDAHNLSVGSDYYIQLEEKSGSNLELDYPPALLTTDMDNPERTGPELSQLTALRSVELEESSTDEDFFQSSTDPKDSSLPGDLHVTSGPESPFNNIFNDVDKSEDLPSHQKIFDLMELNGVQADFKPATLSSSLDNPKESVITGHFEKEKPRKIFDSEPLCLSDNLMHQDNFDPLNVQELSENFLFLQEKNLLKGSLSSKEHINDLQTELKNAGFTEAVLETSCRNSLDTELQFAENKPGLSLLQENVSTKGDDTDVMLTGDTLSTSLQSSPEVQVPPTSFETEETPRRVPPDSLPTQGETQPTCLDVIVPEDCLHQDISPDAVTVPVEILSTDARTHSLDNRSQDSPGESEETLRLTESDSVLADDILASRVSVGSSLPELGQELHNKPFSEDHHSHRRLEKNLEAVETLNQLNSKDAAKEAGLVSALSSDSTSQDSLLEDSLSAPFPASEPSLETPDSLESVDVHEALLDSLGSHTPQKLVPPDKPADSGYETENLESPEWTLHPAPEGTADSEPATTGDGGHSGLPPNPVIVISDAGDGHRGTEVTPETFTAGSQGSYRDSAYFSDNDSEPEKRSEEVPGTSPSALVLVQEQPLPEPVLPEQSPAAQDSCLEARKSQPDESCLSALHNSSDLELRATPEPAQTGVPQQVHPTEDEASSPWSVLNAELSSGDDFETQDDRPCTLASTGTNTNELLAYTNSALDKSLSSHSEGPKLKEPDIEGKYLGKLGVSGMLDLSEDGMDADEEDENSDDSDEDLRAFNLHSLSSESEDETEHPVPIILSNEDGRHLRSLLKPTAANAPDPLPEDWKKEKKAVTFFDDVTVYLFDQETPTKELGPCGGEACGPDLSGPAPASGSPYLSRCINSESSTDEEGGGFEWDDDFSPDPFMSKTTSNLLSSKPSLQTSKYFSPPPPARSTEQSWPHSAPYSRFSISPANIASFSLTHLTDSDIEQGGSSEDGEKD

SEQ ID NO: 184 - protein, 1503 aa, Homo sapiens
MPGPPALRRRLLLLLLVLLIAGSAGAAPLPQTGAGEAPPAAEVSSSFVILCVCSLIILIVLIANCVSCCKDPEIDFKEFEDNFDDEIDFTPPAEDTPSVQSPAEVFTLSVPNISLPAPSQFQPSVEGLKSQVARHSLNYIQEIGNGWFGKVLLGEIYTGTSVARVIVKELKASANPKEQDTFLKNGEPYYILQHPNILQCVGQCVEAIPYLLVFEFCDLGDLKAYLRSEQEHMRGDSQTMLLQRMACEVAAGLAAMHKLHFLHSDLALRNCFLTSDLNVKVGDYGIGFSRYKEDYIETDDKKVFPLRWTAPELVTSFQDRLLTADQTKYSNIWSLGVTLWELFDNAAQPYSNLSNLDVLNQVIRERDTKLPKPQLEQPYSDRWYEVLQFCWLSPEKRPAAEDVHRLLTYLRLQSQRDSEVDFEQQWNALKPNTNSRDSSNNAAFPILDHFARDRLGREMEEVLTVTETSQGLSFEYVWEAAKHDHFDERSRGHLDEGLSYTSIFYPVEVFESSLSDPGPGKQDDSGQDVPLRVPGVVPVFDAHNLSVGSDYYIQLEEKSGSNLELDYPPALLTTDMDNPERTGPELSQLTALRSVELEESSTDEDFFQSSTDPKDSSLPGDLHVTSGPESPFNNIFNDVDKSEDLPSHQKIFDLMELNGVQADFKPATLSSSLDNPKESVITGHFEKEKPRKIFDSEPLCLSDNLMHQDNFDPLNVQELSENFLFLQEKNLLKGSLSSKEHINDLQTELKNAGFTEAMLETSCRNSLDTELQFAENKPGLSLLQENVSTKGDGTDVMLTGDTLSTSLQSSPEVQVPPTSFETEETPRRVPPDSLPTQGETQPTCLDVIVPEDCLHQDISPDAVTVPVEILSTDARTHSLDNRSQDSPGESEETLRLTESDSVLADDILASRVSVGSSLPELGQELHNKPFSEDHHSHRRLEKNLEAVETLNQLNSKDAAKEAGLVSALSSDSTSQDSLLEDSLSAPFPASEPSLETPDSLESVDVHEALLDSLGSHTPQKLVPPDKPADSGYETENLESPEWTLHPAPEGTADSEPATTGDGGHSGLPPNPVIVISDAGDGHRGTEVTPETFTAGSQGSYRDSAYFSDNDSEPEKRSEEVPGTSPSALVLVQEQPLPEPVLPEQSPAAQDSCLEARKSQPDESCLSALHNSSDLELRATPEPAQTGVPQQVHPTEDEASSPWSVLNAELSSGDDFETQDDRPCTLASTGTNTNELLAYTNSALDKSLSSHSEGPKLKEPDIEGKYLGKLGVSGMLDLSEDGMDADEEDENSDDSDEDLRAFNLHSLSSESEDETEHPVPIILSNEDGRHLRSLLKPTAANAPDPLPEDWKKEKKAVTFFDDVTVYLFDQETPTKELGPCGGEACGPDLSGPAPASGSPYLSRCINSESSTDEEGGGFEWDDDFSPDPFMSKTTSNLLSSKPSLQTSKYFSPPPPARSTEQSWPHSAPYSRFSISPANIASFSLTHLTDSDIEQGGSSEDGEKD

SEQ ID NO: 185 - protein, 1503 aa, Homo sapiens
MPGPPALRRRLLLLLLVLLIAGSAGAAPLPQTGAGEAPPAAEVSSSFVILCVCSLIILIVLIANCVSCCKDPEIDFKEFEDNFDDEIDFTPPAEDTPSVQSPAEVFTLSVPNISLPAPSQFQPSVEGLKSQVARHSLNYIQEIGNGWFGKVLLGEIYTGTSVARVIVKELKASANPKEQDTFLKNGEPYYILQHPNILQCVGQCVEAIPYLLVFEFCDLGDLKAYLRSEQEHMRGDSQTMLLQRMACEVAAGLAAMHKLHFLHSDLALRNCFLTSDLNVKVGDYGIGFSRYKEDYIETDDKKVFPLRWTAPELVTSFQDRLLTADQTKYSNIWSLGVTLWELFDNAAQPYSNLSNLDVLNQVIRERDTKLPKPQLEQPYSDRWYEVLQFCWLSPEKRPAAEDVHRLLTYLRLQSQRDSEVDFEQQWNALKPNTNSRDSSNNAAFPILDHFARDRLGREMEEVLTVTETSQGLSFEYVWEAAKHDHFDERSRGHLDEGLSYTSIFYPVEVFESSLSDPGPGKQDDSGQDVPLRVPGVVPVFDAHNLSVGSDYYIQLEEKSGSNLELDYPPALLTTDMDNPERTGPELSQLTALRSVELEESSTDEDFFQSSTDPKDSSLPGDLHVTSGPESPFNNIFNDVDKSEDLPSHQKIFDLMELNGVQADFKPATLSSSLDNPKESVITGHFEKEKPRKIFDSEPLCLSDNLMHQDNFDPLNVQELSENFLFLQEKNLLKGSLSSKEHINDLQTELKNAGFTEAMLETSCRNSLDTELQFAENKPGLSLLQENVSTKGDDTDVMLTGDTLSTSLQSSPEVQVPPTSFETEETPRQVPPDSLPTQGETQPTCLDVIVPEDCLHQDISPDAVTVPVEILSTDARTHSLDNRSQDSPGESEETLRLTESDSVLADDILASRVSVGSSLPELGQELHNKPFSEDHHSHRRLEKNLEAVETLNQLNSKDAAKEAGLVSALSSDSTSQDSLLEDSLSAPFPASEPSLETPDSLESVDVHEALLDSLGSHTPQKLVPPDKPADSGYETENLESPEWTLHPAPEGTADSEPATTGDGGHSGLPPNPVIVISDAGDGHRGTEVTPETFTAGSQGSYRDSAYFSDNDSEPEKRSEEVPGTSPSALVLVQEQPLPEPVLPEQSPAAQDSCLEARKSQPDESCLSALHNSSDLELRATPEPAQTGVPQQVHPTEDEASSPWSVLNAELSSGDDFETQDDRPCTLASTGTNTNELLAYTNSALDKSLSSHSEGPKLKEPDIEGKYLGKLGVSGMLDLSEDGMDADEEDENSDDSDEDLRAFNLHSLSSESEDETEHPVPIILSNEDGRHLRSLLKPTAANAPDPLPEDWKKEKKAVTFFDDVTVYLFDQETPTKELGPCGGEACGPDLSGPAPASGSPYLSRCINSESSTDEEGGGFEWDDDFSPDPFMSKTTSNLLSSKPSLQTSKYFSPPPPARSTEQSWPHSAPYSRFSISPANIASFSLTHLTDSDIEQGGSSEDGEKD

SEQ ID NO: 186 - protein, 1503 aa, Homo sapiens
MPGPPALRRRLLLLLLVLLIAGSAGAAPLPQTGAGEAPPAAEVSSSFVILCVCSLIILIVLIANCVSCCKDPEIDFKEFEDNFDDEIDFTPPAEDTPSVQSPAEVFTLSVPNISLPAPSQFQPSVEGLKSQVARHSLNYIQEIGNGWFGKVLLGEIYTGTSVARVIVKELKASANPKEQDTFLKNGEPYYILQHPNILQCVGQCVEAIPYLLVFEFCDLGDLKAYLRSEQEHMRGDSQTMLLQRMACEVAAGLAAMHKLHFLHSDLALRNCFLTSDLNVKVGDYGIGFSRYKEDYIETDDKKVFPLRWTAPELVTSFQDRLLTADQTKYSNIWSLGVTLWELFDNAAQPYSNLSNLDVLNQVIRERDTKLPKPQLEQPYSDRWYEVLQFCWLSPEKRPAAEDVHRLLTYLRLQSQRDSEVDFEQQWNALKPNTNSRDSSNNAAFPILDHFARDRLGREMEEVLTVTETSQGLSFEYVWEAAKHDHFDERSRGHLDEGLSYTSIFYPVEVFESSLSDPGPGKQDDSGQDVPLRVPGVVPVFDAHNLSVGSDYYIQLEEKSGSNLELDYPPALLTTDMDNPERTGPELSQLTALRSVELEESSTDEDFFQSSTDPKDSSLPGDLHVTSGPESPFNNIFNDVDKSEDLPSHQKIFDLMELNGVQADFKPATLSSSLDNPKESVITGHFEKEKPRKIFDSEPLCLSDNLMHQDNFDPLNVQELSENFLFLQEKNLLKGSLSSKEHINDLQTELKNAGFTEAMLETSCRNSLDTELQFAENKPGLSLLQENVSTKGDDTDVMLTGDTLSTSLQSSPEVQVPPTSFETEETPRRVPPDSLPTQGETQPTCLDVIVPEDCLHQDISPDAVTVPVEILSTDARTHSMDNRSQDSPGESEETLRLTESDSVLADDILASRVSVGSSLPELGQELHNKPFSEDHHSHRRLEKNLEAVETLNQLNSKDAAKEAGLVSALSSDSTSQDSLLEDSLSAPFPASEPSLETPDSLESVDVHEALLDSLGSHTPQKLVPPDKPADSGYETENLESPEWTLHPAPEGTADSEPATTGDGGHSGLPPNPVIVISDAGDGHRGTEVTPETFTAGSQGSYRDSAYFSDNDSEPEKRSEEVPGTSPSALVLVQEQPLPEPVLPEQSPAAQDSCLEARKSQPDESCLSALHNSSDLELRATPEPAQTGVPQQVHPTEDEASSPWSVLNAELSSGDDFETQDDRPCTLASTGTNTNELLAYTNSALDKSLSSHSEGPKLKEPDIEGKYLGKLGVSGMLDLSEDGMDADEEDENSDDSDEDLRAFNLHSLSSESEDETEHPVPIILSNEDGRHLRSLLKPTAANAPDPLPEDWKKEKKAVTFFDDVTVYLFDQETPTKELGPCGGEACGPDLSGPAPASGSPYLSRCINSESSTDEEGGGFEWDDDFSPDPFMSKTTSNLLSSKPSLQTSKYFSPPPPARSTEQSWPHSAPYSRFSISPANIASFSLTHLTDSDIEQGGSSEDGEKD

SEQ ID NO: 187 - protein, 1503 aa, Homo sapiens
MPGPPALRRRLLLLLLVLLIAGSAGAAPLPQTGAGEAPPAAEVSSSFVILCVCSLIILIVLIANCVSCCKDPEIDFKEFEDNFDDEIDFTPPAEDTPSVQSPAEVFTLSVPNISLPAPSQFQPSVEGLKSQVARHSLNYIQEIGNGWFGKVLLGEIYTGTSVARVIVKELKASANPKEQDTFLKNGEPYYILQHPNILQCVGQCVEAIPYLLVFEFCDLGDLKAYLRSEQEHMRGDSQTMLLQRMACEVAAGLAAMHKLHFLHSDLALRNCFLTSDLNVKVGDYGIGFSRYKEDYIETDDKKVFPLRWTAPELVTSFQDRLLTADQTKYSNIWSLGVTLWELFDNAAQPYSNLSNLDVLNQVIRERDTKLPKPQLEQPYSDRWYEVLQFCWLSPEKRPAAEDVHRLLTYLRLQSQRDSEVDFEQQWNALKPNTNSRDSSNNAAFPILDHFARDRLGREMEEVLTVTETSQGLSFEYVWEAAKHDHFDERSRGHLDEGLSYTSIFYPVEVFESSLSDPGPGKQDDSGQDVPLRVPGVVPVFDAHNLSVGSDYYIQLEEKSGSNLELDYPPALLTTDMDNPERTGPELSQLTALRSVELEESSTDEDFFQSSTDPKDSSLPGDLHVTSGPESPFNNIFNDVDKSEDLPSHQKIFDLMELNGVQADFKPATLSSSLDNPKESVITGHFEKEKPRKIFDSEPLCLSDNLMHQDNFDPLNVQELSENFLFLQEKNLLKGSLSSKEHINDLQTELKNAGFTEAMLETSCRNSLDTELQFAENKPGLSLLQENVSTKGDDTDVMLTGDTLSTSLQSSPEVQVPPTSFETEETPRRVPPDSLPTQGETQPTCLDVIVPEDCLHQDISPDAVTVPVEILSTDARTHSLDNRSQDSPGESEETLRLTESDSVLADDILASRVSVGSSLPELGQELHNKPFSEDHHSHRRLEKNLEAVETLNQLNSKDAAKEAGLVSALSSDSTSQDSLLEDSLSAPFPASEPSLETPDSLESVDVHEVLLDSLGSHTPQKLVPPDKPADSGYETENLESPEWTLHPAPEGTADSEPATTGDGGHSGLPPNPVIVISDAGDGHRGTEVTPETFTAGSQGSYRDSAYFSDNDSEPEKRSEEVPGTSPSALVLVQEQPLPEPVLPEQSPAAQDSCLEARKSQPDESCLSALHNSSDLELRATPEPAQTGVPQQVHPTEDEASSPWSVLNAELSSGDDFETQDDRPCTLASTGTNTNELLAYTNSALDKSLSSHSEGPKLKEPDIEGKYLGKLGVSGMLDLSEDGMDADEEDENSDDSDEDLRAFNLHSLSSESEDETEHPVPIILSNEDGRHLRSLLKPTAANAPDPLPEDWKKEKKAVTFFDDVTVYLFDQETPTKELGPCGGEACGPDLSGPAPASGSPYLSRCINSESSTDEEGGGFEWDDDFSPDPFMSKTTSNLLSSKPSLQTSKYFSPPPPARSTEQSWPHSAPYSRFSISPANIASFSLTHLTDSDIEQGGSSEDGEKD

SEQ ID NO: 188 - protein, 512 aa, Homo sapiens
MGCIKSKGKDSLSDDGVDLKTQPVRNTERTIYVRDPTSNKQQRPVPESQLLPGQRFQTKDPEEQGDIVVALYPYDGIHPDDLSFKKGEKMKVLEEHGEWWKAKSLLTKKEGFIPSNYVAKLNTLETEEWVFKDITRKDAERQLLAPGNSAGAFLIRESETLKGSFSLSVRDFDPVHGDVIKHYKIRSLDNGGYYISPRITFPCISDMIKHYQKQADGLCRRLEKACISPKPQKPWDKDAWEIPRESIKLVKRLGAGQFGEVWMGYYNNSTKVAVKTLKPGTMSVQAFLEEANLMKTLQHDKLVRLYAVVTREEPIYIITEYMAKGSLLDFLKSDEGGKVLLPKLIDFSAQIAEGMAYIERKNYIHRDLRAANVLVSESLMCKIADFGLARVIEDNEYTAREGAKFPIKWTAPEAINFGCFTIKSDVWSFGILLYEIVTYGKIPYPGRTNADVMTALSQGYRMPRVENCPDELYDIMKMCWKEKAEERPTFDYLQSVLDDFYTATEGQYQQQP

SEQ ID NO: 189 - protein, 999 aa, Homo sapiens
MGPAPLPLLLGLFLPALWRRAITEAREEAKPYPLFPGPFPGSLQTDHTPLLSLPHASGYQPALMFSPTQPGRPHTGNVAIPQVTSVESKPLPPLAFKHTVGHIILSEHKGVKFNCSISVPNIYQDTTISWWKDGKELLGAHHAITQFYPDDEVTAIIASFSITSVQRSDNGSYICKMKINNEEIVSDPIYIEVQGLPHFTKQPESMNVTRNTAFNLTCQAVGPPEPVNIFWVQNSSRVNEQPEKSPSVLTVPGLTEMAVFSCEAHNDKGLTVSKGVQINIKAIPSPPTEVSIRNSTAHSILISWVPGFDGYSPFRNCSIQVKEADPLSNGSVMIFNTSALPHLYQIKQLQALANYSIGVSCMNEIGWSAVSPWILASTTEGAPSVAPLNVTVFLNESSDNVDIRWMKPPTKQQDGELVGYRISHVWQSAGISKELLEEVGQNGSRARISVQVHNATCTVRIAAVTRGGVGPFSDPVKIFIPAHGWVDYAPSSTPAPGNADPVLIIFGCFCGFILIGLILYISLAIRKRVQETKFGNAFTEEDSELVVNYIAKKSFCRRAIELTLHSLGVSEELQNKLEDVVIDRNLLILGKILGEGEFGSVMEGNLKQEDGTSLKVAVKTMKLDNSSQREIEEFLSEAACMKDFSHPNVIRLLGVCIEMSSQGIPKPMVILPFMKYGDLHTYLLYSRLETGPKHIPLQTLLKFMVDIALGMEYLSNRNFLHRDLAARNCMLRDDMTVCVADFGLSKKIYSGDYYRQGRIAKMPVKWIAIESLADRVYTSKSDVWAFGVTMWEIATRGMTPYPGVQNHEMYDYLLHGHRLKQPEDCLDELYQIMYSCWRTDPLDRPTFSVLRLQLEKLLESLPDVRNQADVIYVNTQLLESSEGLAQGSTLAPLDLNIDPDSIIASCTPRAAISVVTAEVHDSKPHEGRYILNGGSEEWEDLTSAPSAAVTAEKNSVLPGERLVRNGVSWSHSSMLPLGSSLPDELLFADDSSEGSEVLM

SEQ ID NO: 190 - protein, 1408 aa, Homo sapiens
MKAPAVLAPGILVLLFILVQRSNGECKEALAKSEMNVNMKYQLPNFTAETPIQNVILHEHHIFLGATNYIYVLNEEDLQKVAEYKTGPVLEHPDCFPCQDCSSKANLSGGVWKDNINMALVVDTYYDDQLISCGSVNRGTCQRHVFPHNHTADIQSEVHCIFSPQIEEPSQCPDCVVSALGAKVLSSVKDRFINFFVGNTINSSYFPDHPLHSISVRRLKETKDGFMFLTDQSYIDVLPEFRDSYPIKYVHAFESNNFIYFLTVQRETLDAQTFHTRIIRFCSINSGLHSYMEMPLECILTEKRKKRSTKKEVFNILQAAYVSKPGAQLARQIGASLNDDILFGVFAQSKPDSAEPMDRSAMCAFPIKYVNDFFNKIVNKNNVRCLQHFYGPNHEHCFNRTLLRNSSGCEARRDEYRTEFTTALQRVDLFMGQFSEVLLTSISTFIKGDLTIANLGTSEGRFMQVVVSRSGPSTPHVNFLLDSHPVSPEVIVEHTLNQNGYTLVITGKKITKIPLNGLGCRHFQSCSQCLSAPPFVQCGWCHDKCVRSEECLSGTWTQQICLPAIYKVFPNSAPLEGGTRLTICGWDFGFRRNNKFDLKKTRVLLGNESCTLTLSESTMNTLKCTVGPAMNKHFNMSIIISNGHGTTQYSTFSYVDPVITSISPKYGPMAGGTLLTLTGNYLNSGNSRHISIGGKTCTLKSVSNSILECYTPAQTISTEFAVKLKIDLANRETSIFSYREDPIVYEIHPTKSFISTWWKEPLNIVSFLFCFASGGSTITGVGKNLNSVSVPRMVINVHEAGRNFTVACQHRSNSEIICCTTPSLQQLNLQLPLKTKAFFMLDGILSKYFDLIYVHNPVFKPFEKPVMISMGNENVLEIKGNDIDPEAVKGEVLKVGNKSCENIHLHSEAVLCTVPNDLLKLNSELNIEWKQAISSTVLGKVIVQPDQNFTGLIAGVVSISTALLLLLGFFLWLKKRKQIKDLGSELVRYDARVHTPHLDRLVSARSVSPTTEMVSNESVDYRATFPEDQFPNSSQNGSCRQVQYPLTDMSPILTSGDSDISSPLLQNTVHIDLSALNPELVQAVQHVVIGPSSLIVHFNEVIGRGHFGCVYHGTLLDNDGKKIHCAVKSLNRITDIGEVSQFLTEGIIMKDFSHPNVLSLLGICLRSEGSPLVVLPYMKHGDLRNFIRNETHNPTVKDLIGFGLQVAKAMKYLASKKFVHRDLAARNCMLDEKFTVKVADFGLARDMYDKEYYSVHNKTGAKLPVKWMALESLQTQKFTTKSDVWSFGVVLWELMTRGAPPYPDVNTFDITVYLLQGRRLLQPEYCPDPLYEVMLKCWHPKAEMRPSFSELVSRISAIFSTFIGEHYVHVNATYVNVKCVAPYPSLLSSEDNADDEVDTRPASFWETS

SEQ ID NO: 191 - protein, 1408 aa, Homo sapiens
MKAPAVLAPGILVLLFTLVQRSNGECKEALAKSEMNVNMKYQLPNFTAETPIQNVILHEHHIFLGATNYIYVLNEEDLQKVAEYKTGPVLEHPDCFPCQDCSSKANLSGGVWKDNINMALVVDTYYDDQLISCGSVNRGTCQRHVFPHNHTADIQSEVHCIFSPQIEEPSQCPDCVVSALGAKVLSSVKDRFINFFVGNTINSSYFPDHPLHSISVRRLKETKDGFMFLTDQSYIDVLPEFRDSYPIKYVHAFESNNFIYFLTVQRETLDAQTFHTRIIRFCSINSGLHSYMEMPLECILTEKRKKRSTKKEVFNILQAAYVSKPGAQLARQIGASLNDDILFGVFAQSKPDSAEPMDRSAMCAFSIKYVNDFFNKIVNKNNVRCLQHFYGPNHEHCFNRTLLRNSSGCEARRDEYRTEFTTALQRVDLFMGQFSEVLLTSISTFIKGDLTIANLGTSEGRFMQVVVSRSGPSTPHVNFLLDSHPVSPEVIVEHTLNQNGYTLVITGKKITKIPLNGLGCRHFQSCSQCLSAPPFVQCGWCHDKCVRSEECLSGTWTQQICLPAIYKVFPNSAPLEGGTRLTICGWDFGFRRNNKFDLKKTRVLLGNESCTLTLSESTMNTLKCTVGPAMNKHFNMSIIISNGHGTTQYSTFSYVDPVITSISPKYGPMAGGTLLTLTGNYLNSGNSRHISIGGKTCTLKSVSNSILECYTPAQTISTEFAVKLKIDLANRETSIFSYREDPIVYEIHPTKSFISTWWKEPLNIVSFLFCFASGGSTITGVGKNLNSVSVPRMVINVHEAGRNFTVACQHRSNSEIICCTTPSLQQLNLQLPLKTKAFFMLDGILSKYFDLIYVHNPVFKPFEKPVMISMGNENVLEIKGNDIDPEAVKGEVLKVGNKSCENIHLHSEAVLCTVPNDLLKLNSELNIEWKQAISSTVLGKVIVQPDQNFTGLIAGVVSISTALLLLLGFFLWLKKRKQIKDLGSELVRYDARVHTPHLDRLVSARSVSPTTEMVSNESVDYRATFPEDQFPNSSQNGSCRQVQYPLTDMSPILTSGDSDISSPLLQNTVHIDLSALNPELVQAVQHVVIGPSSLIVHFNEVIGRGHFGCVYHGTLLDNDGKKIHCAVKSLNRITDIGEVSQFLTEGIIMKDFSHPNVLSLLGICLRSEGSPLVVLPYMKHGDLRNFIRNETHNPTVKDLIGFGLQVAKAMKYLASKKFVHRDLAARNCMLDEKFTVKVADFGLARDMYDKEYYSVHNKTGAKLPVKWMALESLQTQKFTTKSDVWSFGVVLWELMTRGAPPYPDVNTFDITVYLLQGRRLLQPEYCPDPLYEVMLKCWHPKAEMRPSFSELVSRISAIFSTFIGEHYVHVNATYVNVKCVAPYPSLLSSEDNADDEVDTRPASFWETS

SEQ ID NO: 192 - protein, 1408 aa, Homo sapiens
MKAPAVLAPGILVLLFTLVQRSNGECKEALAKSEMNVNMKYQLPNFTAETPIQNVILHEHHIFLGATNYIYVLNEEDLQKVAEYKTGPVLEHPDCFPCQDCSSKANLSGGVWKDNINMALVVDTYYDDQLISCGSVNRGTCQRHVFPHNHTADIQSEVHCIFSPQIEEPSQCPDCVVSALGAKVLSSVKDRFINFFVGNTINSSYFPDHPLHSISVRRLKETKDGFMFLTDQSYIDVLPEFRDSYPIKYVHAFESNNFIYFLTVQRETLDAQTFHTRIIRFCSINSGLHSYMEMPLECILTEKRKKRSTKKEVFNILQAAYVSKPGAQLARQIGASLNDDILFGVFAQSKPDSAEPMDRSAMCAFPIKYVNDFFNKIVNKNNVRCLQHFYGPNHEHCFNRTLLRNSSGCEARRDEYRTEFTTALQRVDLFMGQFSEVLLTSISTFIKGDLTIANLGTSEGRFMQVVVSRSGPSTPHVNFLLDSHPVSPEVIVEHTLNQNGYTLVITGKKITKIPLNGLGCRHFQSCSQCLSAPPFVQCGWCHDKCVRSEECLSGTWTQQICLPAIYKVFPNSAPLEGGTRLTICGWDFGFRRNNKFDLKKTRVLLGNESCTLTLSESTMNTLKCTVGPAMNKHFNMSIIISNGHGTTQYSTFSYVDPVITSISPKYGPMAGGTLLTLTGNYLNSGNSRHILIGGKTCTLKSVSNSILECYTPAQTISTEFAVKLKIDLANRETSIFSYREDPIVYEIHPTKSFISTWWKEPLNIVSFLFCFASGGSTITGVGKNLNSVSVPRMVINVHEAGRNFTVACQHRSNSEIICCTTPSLQQLNLQLPLKTKAFFMLDGILSKYFDLIYVHNPVFKPFEKPVMISMGNENVLEIKGNDIDPEAVKGEVLKVGNKSCENIHLHSEAVLCTVPNDLLKLNSELNIEWKQAISSTVLGKVIVQPDQNFTGLIAGVVSISTALLLLLGFFLWLKKRKQIKDLGSELVRYDARVHTPHLDRLVSARSVSPTTEMVSNESVDYRATFPEDQFPNSSQNGSCRQVQYPLTDMSPILTSGDSDISSPLLQNTVHIDLSALNPELVQAVQHVVIGPSSLIVHFNEVIGRGHFGCVYHGTLLDNDGKKIHCAVKSLNRITDIGEVSQFLTEGIIMKDFSHPNVLSLLGICLRSEGSPLVVLPYMKHGDLRNFIRNETHNPTVKDLIGFGLQVAKAMKYLASKKFVHRDLAARNCMLDEKFTVKVADFGLARDMYDKEYYSVHNKTGAKLPVKWMALESLQTQKFTTKSDVWSFGVVLWELMTRGAPPYPDVNTFDITVYLLQGRRLLQPEYCPDPLYEVMLKCWHPKAEMRPSFSELVSRISAIFSTFIGEHYVHVNATYVNVKCVAPYPSLLSSEDNADDEVDTRPASFWETS

SEQ ID NO: 193 - protein, 466 aa, Homo sapiens
MLRGGRRGQLGWHSWAAGPGSLLAWLILASAGAAPCPDACCPHGSSGLRCTRDGALDSLHHLPGAENLTELYIENQQHLQHLELRDLRGLGELRNLTIVKSGLRFVAPDAFHFTPRLSRLNLSFNALESLSWKTVQGLSLQELVLSGNPLHCSCALRWLQRWEEEGLGGVPEQKLQCHGQGPLAHMPNASCGVPTLKVQVPNASVDVGDDVLLRCQVEGRGLEQAGWILTELEQSATVMKSGGLPSLGLTLANVTSDLNRKNVTCWAENDVGRAEVSVQVNVSFPASVQLHTAVEMHHWCIPFSVDGQPAPSLRWLFNGSVLNETSFIFTEFLEPAANETVRHGCLRLNQPTHVNNGNYTLLAANPFGQASASIMAAFMDNPFEFNPEDPIPVSFSPVDTNSTSGDPVEKKDETPFGVSVAVGLAVFACLFLSTLLLVLNKCGRRNKFGINRTEGGVRECSAGLPT

SEQ ID NO: 194 - protein, 656 aa, Homo sapiens
MLRGGRRGQLGWHSWAAGPGSLLAWLILASAGAAPCPDACCPHGSSGLRCTRDGALDSLHHLPGAENLTELYIENQQHLQHLELRDLRGLGELRNLTIVKSGLRFVAPDAFHFTPRLSRLNLSFNALESLSWKTVQGLSLQELVLSGNPLHCSCALRWLQRWEEEGLGGVPEQKLQCHGQGPLAHMPNASCGVPTLKVQVPNASVDVGDDVLLRCQVEGRGLEQAGWILTELEQSATVMKSGGLPSLGLTLANVTSDLNRKNVTCWAENDVGRAEVSVQVNVSFPASVQLHTAVEMHHWCIPFSVDGQPAPSLRWLFNGSVLNETSFIFTEFLEPAANETVRHGCLRLNQPTHVNNGNYTLLAANPFGQASASIMAAFMDNPFEFNPEDPIPVSFSPVDTNSTSGDPVEKKDETPFGVSVAVGLAVFACLFLSTLLLVLNKCGRRNKFGINRPAVLAPEDGLAMSLHFMTLGGSSLSPTEGKGSGLQGHIIENPQYFSDACVHHIKRRDIVLKWELGEGAFGKVFLAECHNLLPEQDKMLVAVKALKEASESARQDFQREAELLTMLQHQHIVRFFGVCTEGRPCSWSSSICGTGTSTASSDPMDPMPSCWLVGRMWLQAPWVWGSCWPWLARSLRGWCTWRVCILCTGTWPHATV

SEQ ID NO: 195 - protein, 796 aa, Homo sapiens
MLRGGRRGQLGWHSWAAGPGSLLAWLILASAGAAPCPDACCPHGSSGLRCTRDGALDSLHHLPGAENLTELYIENQQHLQHLELRDLRGLGELRNLTIVKSGLRFVAPDAFHFTPRLSRLNLSFNALESLSWKTVQGLSLQELVLSGNPLHCSCALRWLQRWEEEGLGGVPEQKLQCHGQGPLAHMPNASCGVPTLKVQVPNASVDVGDDVLLRCQVEGRGLEQAGWILTELEQSATVMKSGGLPSLGLTLANVTSDLNRKNVTCWAENDVGRAEVSVQVNVSFPASVQLHTAVEMHHWCIPFSVDGQPAPSLRWLFNGSVLNETSFIFTEFLEPAANETVRHGCLRLNQPTHVNNGNYTLLAANPFGQASASIMAAFMDNPFEFNPEDPIPVSFSPVDTNSTSGDPVEKKDETPFGVSVAVGLAVFACLFLSTLLLVLNKCGRRNKFGINRPAVLAPEDGLAMSLHFMTLGGSSLSPTEGKGSGLQGHIIENPQYFSDACVHHIKRRDIVLKWELGEGAFGKVFLAECHNLLPEQDKMLVAVKALKEASESARQDFQREAELLTMLQHQHIVRFFGVCTEGRPLLMVFEYMRHEDLNRFLRSHGPDAKLLAGGEDVAPGPLGLGQLLAVASQVAAGMVYLAGLHFVHRDLATRNCLVGQGLVVKIGDFGMSRDIYSTDYYRVGGRTMLPIRWMPPESILYRKFTTESDVWSFGVVLWEIFTYGKQPWYQLSNTEAIDCITQGRELERPRACPPEVYAIMRGCWQREPQQRHSIKDVHARLQALAQAPPVYLDVLG

SEQ ID NO: 196 - protein, 796 aa, Homo sapiens
MLRGGRRGQLGWHSWAAGPGSLLAWLILASAGAAPCPDACCPHGSSGLRCTRDGALDSLHHLPGAENLTELYIENQQHLQHLELRDLRGLGELRNLTIVKSGLRFVAPDAFHFTPRLSRLNLSFNALESLSWKTVQGLSLQELVLSGNPLHCSCALRWLQRWEEEGLGGVPEQKLQCHGQGPLAHMPNASCGVPTLKVQVPNASVDVGDDVLLRCQVEGRGLEQAGWILTELEQSATVMKSGGLPSLGLTLANVTSDLNRKNVTCWAENDVGRAEVSVQVNVSFPASVQLHTAVEMHHWCIPFSVDGQPAPSLRWLFNGSVLNETSFIFTEFLEPAANETVRHGCLRLNQPTHVNNGNYTLLAANPFGQASASIMAAFMDNPFEFNPEDPIPVSFSPVDTNSTSGDPVEKKDETPFGVSVAVGLAVFACLFLSTLLLVLNKCGRRNKFGINRPAVLAPEDGLAMSLHFMTLGGSSLSPTEGKGSGLQGHIIENPQYFSDACVHHIKRRDIVLKWELGEGAFGKVFLAECHNLLPEQDKMLVAVKALKEASESARQDFQREAELLTMLQHQHIVRFFGVCTEGRPLLMVFEYMRHGDLNRFLRSHGPDAKLLAGGEDVAPGPLGLGQLLAVASQVAAGMVYLAGLHFVHRDLATRNCLVGQGLVVKIGDFGMSRDIYSTDYYRVGGRTMLPIRWMPPESILYRKFTTESDVWSFGVVLWEIFTYGKQPWYQLSNTEAIDCITQGRELEWPRACPPEVYAIMRGCWQREPQQRHSIKDVHARLQALAQAPPVYLDVLG

SEQ ID NO: 197 - protein, 838 aa, Homo sapiens
MSSWIRWHGPAMARLWGFCWLVVGFWRAAFACPTSCKCSASRIWCSDPSPGIVAFPRLEPNSVDPENITEIFIANQKRLEIINEDDVEAYVGLRNLTIVDSGLKFVAHKAFLKNSNLQHINFTRNKLTSLSRKHFRHLDLSELILVGNPFTCSCDIMWIKTLQEAKSSPDTQDLYCLNESSKNIPLANLQIPNCGLPSANLAAPNLTVEEGKSITLSCSVAGDPVPNMYWDVGNLVSKHMNETSHTQGSLRITNISSDDSGKQISCVAENLVGEDQDSVNLTVHFAPTITFLESPTSDHHWCIPFTVKGNPKPALQWFYNGAILNESKYICTKIHVTNHTEYHGCLQLDNPTHMNNGDYTLIAKNEYGKDEKQISAHFMGWPGIDDGANPNYPDVIYEDYGTAANDIGDTTNRSNEIPSTDVTDKTGREHLSVYAVVVIASVVGFCLLVMLFLLKLARHSKFGMKDFSWFGFGKVKSRQGVGPASVISNDDDSASPLHHISNGSNTPSSSEGGPDAVIIGMTKIPVIENPQYFGITNSQLKPDTFVQHIKRHNIVLKRELGEGAFGKVFLAECYNLCPEQDKILVVVKTLKDASDNARKDFHREAELLTNLQHEHIVKFYGVCVEGDPLIMVFEYMKHGDLNKFLRAHGPDAVLMAEGNPPTELTQSQMLHIAQQIAAGMVYLASQHFVHRDLATRNCLVGENLLVKIGDFGMSRDVYSTDYYRVGGHTMLPIRWMPPESIMYRKFTTESDVWSLGVVLWEIFTYGKQPWYQLSNNEVIECITQGRVLQRPRTCPQEVYELMLGCWQREPHMRKNIKGIHTLLQNLAKASPVYLDILG

SEQ ID NO: 198 - protein, 838 aa, Homo sapiens
MSSWIRWHGPAMARLWGFCWLVVGFWRAAFACPTSCKCSASRIWCSDPSPGIVAFPRLEPNSVDPENITEIFIANQKRLEIINEDDVEAYVGLRNLTIVDSGLKFVAHKAFLKNSNLQHINFTRNKLTSLSRKHFRHLDLSELILVGNPFTCSCDIMWIKTLQEAKSSPDTQDLYCLNESSKNIPLANLQIPNCGLPSANLAAPNLTVEEGKSITLSCSVAGDPVPNMYWDVGNLVSKHMNETSHTQGSLRITNISSDDSGKQISCVAENLVGEDQDSVNLTVHFAPTITFLESPTSDHHWCIPFTVKGNPKPALQWFYNGAILNESKYICTKIHVTNHTEYHGCLQLDNPTHMNNGDYTLIAKNEYGKDEKQISAHFMGWPGIDDGANPNYPDVIYEDYGTAANDIGDTTNRSNEIPSTDVTDKTGREHLSVYAVVVIASVVGFCLLVMLFLLKLARHSKFGMKDFSWFGFGKVKSRQGVGPASVISNDDDSASPLHHISNGSNTPSSSEGGPDAVIIGMTKIPVIENPQYFGITNSQLKPDTFVQHIKRHNIVLKRELGEGAFGKVFLAECYNLCPEQDKILVAVKTLKDASDNARKDFHREAELLTNLQHEHIVKFYGICVEGDPLIMVFEYMKHGDLNKFLRAHGPDAVLMAEGNPPTELTQSQMLHIAQQIAAGMVYLASQHFVHRDLATRNCLVGENLLVKIGDFGMSRDVYSTDYYRVGGHTMLPIRWMPPESIMYRKFTTESDVWSLGVVLWEIFTYGKQPWYQLSNNEVIECITQGRVLQRPRTCPQEVYELMLGCWQREPHMRKNIKGIHTLLQNLAKASPVYLDILG

SEQ ID NO: 199 - protein, 699 aa, Homo sapiens
MSSWIRWHGPAMARLWGFCWLVVGFWRAAFACPTSCKCSASRIWCSDPSPGIVAFPRLEPNSVDPENITEIFIANQKRLEIINEDDVEAYVGLRNLTIVDSGLKFVAHKAFLKNSNLQHINFTRNKLTSLSRKHFRHLDLSELILVGNPFTCSCDIMWIKTLQEAKSSPDTQDLYCLNESSKNIPLANLQIPNCGLPSANLAAPNLTVEEGKSITLSCSVAGDPVPNMYWDVGNLVSKHMNETSHTQGSLRITNISSDDSGKQISCVAENLVGEDQDSVNLTVHFAPTITFLESPTSDHHWCIPFTVKGNPKPALQWFYNGAILNESKYICTKIHVTNHTEYHGCLQLDNPTHMNNGDYTLIAKNEYGKDEKQISAHFMGWPGIDDGANPNYPDVIYEDYGTAANDIGDTTNRSNEIPSTDVTDKTGREHLSVYAVVVIASVVGFCLLVMLFLLKLARHSKFGMKDFSWFGFGKVKSRQGVGPASVISNDDDSASPLHHISNGSNTPSSSEGGPDAVIIGMTKIPVIENPQYFGITNSQLKPDTFVQHIKRHNIVLKRELGEGAFGKVFLAECYNLCPEQDKILVAVKTLKDASDNARKDFHREAELLTNLQHEHIVKFYGVCVEGDPLIMVFEYMKHGDLNKFLRSVATQCCPFAGCLQRASCTGNSRRKATSGAWGSCCGRFSPMANSPGTSCQTMR

SEQ ID NO: 200 - protein, 534 aa, Homo sapiens
MDVSLCPAKCSFWRIFLLGSVWLDYVGSVLACPANCVCSKTEINCRRPDDGNLFPLLEGQDSGNSNGNASINITDISRNITSIHIENWRSLHTLNAVDMELYTGLQKLTIKNSGLRSIQPRAFAKNPHLRYINLSSNRLTTLSWQLFQTLSLRELQLEQNFFNCSCDIRWMQLWQEQGEAKLNSQNLYCINADGSQLPLFRMNISQCDLPEISVSHVNLTVREGDNAVITCNGSGSPLPDVDWIVTGLQSINTHQTNLNWTNVHAINLTLVNVTSEDNGFTLTCIAENVVGMSNASVALTVYYPPRVVSLEEPELRLEHCIEFVVRGNPPPTLHWLHNGQPLRESKIIHVEYYQEGEISEGCLLFNKPTHYNNGNYTLIAKNPLGTANQTINGHFLKEPFPESTDNFILFDEVSPTPPITVTHKPEEDTFGVSIAVGLAAFACVLLVVLFVMINKYGRRSKFGMKGPVAVISGEEDSASPLHHINHGITTPSSLDAGPDTVVIGMTRIPVIENPQYFRQGHNCHKPDTYSAHTC

SEQ ID NO: 201 - protein, 825 aa, Homo sapiens
MDVSLCPAKCSFWRIFLLGSVWLDYVGSVLACPANCVCSKTEINCRRPDDGNLFPLLEGQDSGNSNGNASINITDISRNITSIHIENWRSLHTLNAVDMELYTGLQKLTIKNSGLRSIQPRAFAKNPHLRYINLSSNRLTTLSWQLFQTLSLRELQLEQNFFNCSCDIRWMQLWQEQGEAKLNSQNLYCINADGSQLPLFRMNISQCDLPEISVSHVNLTVREGDNAVITCNGSGSPLPDVDWIVTGLQSINTHQTNLNWTNVHAINLTLVNVTSEDNGFTLTCIAENVVGMSNASVALTVYYPPRVVSLEEPELRLEHCIEFVVRGNPPPTLHWLHNGQPLRESKIIHVEYYQEGEISEGCLLFNKPTHYNNGNYTLIAKNPLGTANQTINGHFLKEPFPESTDNFILFDEVSPTPPITVTHKPEEDTFGVSIAVGLAAFACVLLVVLFVMINKYGRRSKFGMKGPVAVISGEEDSASPLHHINHGITTPSSLDAGPDTVVIGMTRIPVIENPQYFRQGHNCHKPDTYVQHIKRRDIVLKRELGEGAFGKVFLAECYNLSPTKDKMLVAVKALKDPTLAARKDFQREAELLTNLQHEHIVKFYGVCDDGDPLIMVFEYMKHGDLNKFLRAHGPDAMILVDGQPRQAKGELGLSQMLHIASQIASGMVYLASQHFVHRDLATRNCLVGANLLVKIGDFGMSRDVYSTDYYRVGGHTMLPIRWMPPESIMYRKFTTESDVWSFGVILWEIFTYGKQPWFQLSNTEVIECITQGRVLERPRVCPKEVYDVMLGCWQREPQQRLNIKEIYKILHALGKATPIYLDILG

SEQ ID NO: 202 - protein, 662 aa, Homo sapiens
MDVSLCPAKCSFWRIFLLGSVWLDYVGSVLACPANCVCSKTEINCRRPDDGNLFPLLEGQDSGNSNGNASINITDISRNITSIHIENWRSLHTLNAVDMELYTGLQKLTIKNSGLRSIQPRAFAKNPHLRYINLSSNRLTTLSWQLFQTLSLRELQLEQNFFNCSCDIRWMQLWQEQGEAKLNSQNLYCINADGSQLPLFRMNISQCDLPEISVSHVNLTVREGDNAVITCNGSGSPLPDVDWIVTGLQSINTHQTNLNWTNVHAINLTLVNVTSEDNGFTLTCIAENVVGMSNASVALTVYYPPRVVSLEEPELRLEHCIEFVVRGNPPPTLHWLHNGQPLRESKIIHVEYYQEGEISEGCLLFNKPTHYNNGNYTLIAKNPLGTANQTINGHFLKEPFPESTDNFILFDEVSPTPPITVTHKPEEDTFGVSIAVGLAAFACVLLVVLFVMINKYGRRSKFGMKGPVAVISGEEDSASPLHHINHGITTPSSLDAGPDTVVIGMTRIPVIENPQYFRQGHNCHKPDTYVQHIKRRDIVLKRELGEGAFGKVFLAECYNLSPTKDKMLVAVKALKDPTLAARKDFQREAELLTNLQHEHIVKFYGVCGDGDPLIMVFEYMKHGDLNKFLRWEDTPCSPFAGCLLKASCTGSSLQRVMYGASG

SEQ ID NO: 203 - protein, 1089 aa, Homo sapiens
MGTSHPAFLVLGCLLTGLSLILCQLSLPSILPNENEKVVQLNSSFSLRCFGESEVSWQYPMSEEESSDVEIRNEENNSDLFVTVLEVSSASAAHTGLYTCYYNHTQTEENELEGRHIYIYVPDPDVAFVPLGMTDYLVIVEDDDSAIIPCRTTDPETPVTLHNSEGVVPASYDSRQGFNGTFTVGPYICEATVKGKKFQTIPFNVYALKATSELDLEMEALKTVYKSGETIVVTCAVFNNEVVDLQWTYPGEVKGKGITMLEEIKVPSIKLVYTLTVPEATVKDSGDYECAARQATREVKEMKKVTISVHEKGFIEIKPTFSQLEAVNLHEVKHFVVEVRAYPPPRISWLKNNLTLIENLTEITTDVEKIQEIRYRSKLKLIRAKEEDSGHYTIVAQNEDAVKSYTFELLTQVPSSILDLVDDHHGSTGGQTVRCTAEGTPLPDIEWMICKDIKKCNNETSWTILANNVSNIITEIHSRDRSTVEGRVTFAKVEETIAVRCLAKNLLGAENRELKLVAPTLRSELTVAAAVLVLLVIVIISLIVLVVIWKQKPRYEIRWRVIESISPDGHEYIYVDPMQLPYDSRWEFPRDGLVLGRVLGSGAFGKVVEGTAYGLSRSQPVMKVAVKMLKPTARSSEKQALMSELKIMTHLGPHLNIVNLLGACTKSGPIYIITEYCFYGDLVNYLHKNRDSFLSHHPEKPKKELDIFGLNPADESTRSYVILSFENNGDYMDMKQADTTQYVPMLERKEVSKYSDIQRSLYDRPASYKKKSMLDSEVKNLLSDDNSEGLTLLDLLSFTYQVARGMEFLASKNCVHRDLAARNVLLAQGKIVKICDFGLARDIMHDSNYVSKGSTFLPVKWMAPESIFDNLYTTLSDVWSYGILLWEIFSLGGTPYPGMMVDSTFYNKIKSGYRMAKPDHATSEVYEIMVKCWNSEPEKRPSFYHLSEIVENLLPGQYKKSYEKIHLDFLKSDHPAVARMRVDSDNAYIGVTYKNEEDKLKDWEGGLDEQRLSADSGYIIPLPDIDPVPEEEDLGKRNRHSSQTSEESAIETGSSSSTFIKREDETIEDIDMMDDIGIDSSDLVEDSFL

SEQ ID NO: 204 - protein, 384 aa, Homo sapiens
MTRRGRRRSSHFLGPPAGAAGCTQRRSRELAAAAMSHQTGIQASEDVKEIFARARNGKYRLLKISIENEQLVIGSYSQPSDSWDKDYDSFVLPLLEDKQPCYILFRLDSQNAQGYEWIFIAWSPDHSHVRQKMLYAATRATLKKEFGGGHIKDEVFGTVKEDVSLHGYKKYLLSQSSPAPLTAAEEELRQIKINEVQTDVGVDTKHQTLQGVAFPISREAFQALEKLNNRQLNYVQLEIDIKNEIIILANTTNTELKELPKRIPKDSARYHFFLYKHSHEGDYLESIVFIYSMPGYTCSIRERMLYSSCKSRLLEIVERQLQMDVIRKIEIDNGDELTADFLYEEVHPKQHAHKQSFAKPKGPAGKRGIRRLIRGPAETEATTD

SEQ ID NO: 205 - protein, 384 aa, Homo sapiens
MTRRGRRRSSHFLGPPAGAAGCTQRRSRELAAAAMSHQTGIQASEDVKEIFARARNGKYRLLKISIENEQLVIGSYSQPSDSWDKDYDSFVLPLLEDKQPCYILFRLDSQNAQGYEWIFIAWSPDHSHVRQKMLYAATRATLKKEFGGGHIKDEVFGTVKEDVSLHGYKKYLLSQSSPAPLTAAEEELRQIKINEVQTDVGVDTKHQTLQGVAFPISREAFQALEKLNNRQLNYVQLEIDIKNEIIILANTTNTELKDLPKRIPRDSARYHFFLYKHSHEGDYLESIVFIYSMPGYTCSIRERMLYSSCKSRLLEIVERQLQMDVIRKIEIDNGDELTADFLYEEVHPKQHAHKQSFAKPKGPAGKRGIRRLIRGPAETEATTD

SEQ ID NO: 206 - protein, 384 aa, Homo sapiens
MTRRGRRRSSHFLGPPAGAAGCTQRRSRELAAAAMSHQTGIQASEDVKEIFARARNGKYRLLKISIENEQLVIGSYSQPSDSWDKDYDSFVLPLLEDKQPCYILFRLDSQNAQGYEWIFIAWSPDHSHVRQKMLYAATRATLKKEFGGGHIKDEVFGTVKEDVSLHGYKKYLLSQSSPAPLTAAEEELRQIKINEVQTDVGVDTKHQTLQGVAFPISREAFQALEKLNNRQLNYVQLEIDIKNEIIILANTTNTELKDLPKRIPKDSARYHFFLYKHSHEGDYLESIVFIYSMPGYTCSIRERMLYSSCKSRLLEIVERQLQMDVIRKIEIDSGDELTADFLYEEVHPKQHAHKQSFAKPKGPAGKRGIRRLIRGPAETEATTD

SEQ ID NO: 207 - protein, 1009 aa, Homo sapiens
MSGVSEPLIRVKLGTLRRPEGPAEPMVVVPVDVEKEDVRILKVCFYSNSFNPGKNFKLVKCTVQTEIREIITSILLSGRIGPNIRLAECYGLRLKHMKSDEIHWLHPQMTVGEVQDKYECLHVEAEWRYDLQIRYLPEDFMESLKEDRTTLLYFYQQLRNDYMQRYASKVSEGMALQLGCLELRRFFKDMPHNALDKKSNFELLEKEVGLDLFFPKQMQENLKPKQFRKMIQQTFQQYASLREEECVMKFFNTLAGFANIDQETYRCELIQGWNITVDLVIGPKGIRQLTSQDAKPTCLAEFKQIRSIRCLPLEEGQAVLQLGIEGAPQALSIKTSSLAEAENMADLIDGYCRLQGEHQGSLIIHPRKDGEKRNSLPQIPMLNLEARRSHLSESCSIESDIYAEIPDETLRRPGGPQYGIAREDVVLNRILGEGFFGEVYEGVYTNHKGEKINVAVKTCKKDCTLDNKEKFMSEAVIMKNLDHPHIVKLIGIIEEEPTWIIMELYPYGELGHYLERNKNSLKVLTLVLYSLQICKAMAYLESINCVHRDIAVRNILVASPECVKLGDFGLSRYIEDEDYYKASVTRLPIKWMSPESINFRRFTTASDVWMFAVCMWEILSFGKQPFFWLENKDVIGVLEKGDRLPKPDLCPPVLYTLMTRCWDYDPSDRPRFTELVCSLSDVYQMEKDIAMEQERNARYRTPKILEPTAFQEPPPKPSRPKYRPPPQTNLLAPKLQFQVPEGLCASSPTLTSPMEYPSPVNSLHTPPLHRHNVFKRHSMREEDFIQPSSREEAQQLWEAEKVKMRQILDKQQKQMVEDYQWLRQEEKSLDPMVYMNDKSPLTPEKEVGYLEFTGPPQKPPRLGAQSIQPTANLDRTDDLVYLNVMELVRAVLELKNELCQLPPEGYVVVVKNVGLTLRKLIGSVDDLLPSLPSSSRTEIEGTQKLLNKDLAELINKMRLAQQNAVTSLSEECKRQMLTASHTLAVDAKNLLDAVDQAKVLANLAHPPAE

SEQ ID NO: 208 - protein, 1009 aa, Homo sapiens
MSGVSEPLSRVKLGTLRRPEGPAEPMVVVPVDVEKEDVRILKVCFYSNSFNPGKNFKLVKCTVQTEIREIITSILLSGRIGPNIRLAECYGLRLKHMKSDEIHWLHPQMTVGEVQDKYECLHVEAEWRYDLQIRYLPEDFMESLKEDRTTLLYFYQQLRNDYMQRYASKVSEGMALQLGCLELRRFFKDMPHNALDKKSNFELLEKEVGLDLFFPKQMQENLKPKQFRKMIQQTFQQYASLREEECVMKFFNTLAGFANIDQETYRCELIQGWNITVDLVIGPKGIRQLTSQDAKPTCLAEFKQIRSIRCLPLEEGQAVLQLGIEGAPQALSIKTSSLAEAENMADLIDGYCRLQGEHQGSLIIHPRKDGEKRNSLPQIPMLNLEARRSHLSESYSIESDIYAEIPDETLRRPGGPQYGIAREDVVLNRILGEGFFGEVYEGVYTNHKGEKINVAVKTCKKDCTLDNKEKFMSEAVIMKNLDHPHIVKLIGIIEEEPTWIIMELYPYGELGHYLERNKNSLKVLTLVLYSLQICKAMAYLESINCVHRDIAVRNILVASPECVKLGDFGLSRYIEDEDYYKASVTRLPIKWMSPESINFRRFTTASDVWMFAVCMWEILSFGKQPFFWLENKDVIGVLEKGDRLPKPDLCPPVLYTLMTRCWDYDPSDRPRFTELVCSLSDVYQMEKDIAMEQERNARYRTPKILEPTAFQEPPPKPSRPKYRPPPQTNLLAPKLQFQVPEGLCASSPTLTSPMEYPSPVNSLHTPPLHRHNVFKRHSMREEDFIQPSSREEAQQLWEAEKVKMRQILDKQQKQMVEDYQWLRQEEKSLDPMVYMNDKSPLTPEKEVGYLEFTGPPQKPPRLGAQSIQPTANLDRTDDLVYLNVMELVRAVLELKNELCQLPPEGYVVVVKNVGLTLRKLIGSVDDLLPSLPSSSRTEIEGTQKLLNKDLAELINKMRLAQQNAVTSLSEECKRQMLTASHTLAVDAKNLLDAVDQAKVLANLAHPPAE

SEQ ID NO: 209 - protein, 1009 aa, Homo sapiens
MSGVSEPLSRVKLGTLRRPEGPAEPMVVVPVDVEKEDVRILKVCFYSNSFNPGKNFKLVKCTVQTEIREIITSILLSGRIGPNIRLAECYGLRLKHMKSDEIHWLHPQMTVGEVQDKYECLHVEAEWRYDLQIRYLPEDFMESLKEDRTTLLYFYQQLRNDYMQRYASKVSEGMALQLGCLELRRFFKDMPHNALDKKSNFELLEKEVGLDLFFPKQMQENLKPKQFRKMIQQTFQQYASLREEECVMKFFNTLAGFANIDQETYRCELIQGWNITVDLVIGPKGIRQLTSQDAKPTCLAEFKQIRSIRCLPLEEGQAVLQLGIEGAPQALSIKTSSLAEAENMADLIDGYCRLQGEHQGSLIIHPRKDGEKRNSLPQIPMLNLEARRSHLSESCSIESDIYAQIPDETLRRPGGPQYGIAREDVVLNRILGEGFFGEVYEGVYTNHKGEKINVAVKTCKKDCTLDNKEKFMSEAVIMKNLDHPHIVKLIGIIEEEPTWIIMELYPYGELGHYLERNKNSLKVLTLVLYSLQICKAMAYLESINCVHRDIAVRNILVASPECVKLGDFGLSRYIEDEDYYKASVTRLPIKWMSPESINFRRFTTASDVWMFAVCMWEILSFGKQPFFWLENKDVIGVLEKGDRLPKPDLCPPVLYTLMTRCWDYDPSDRPRFTELVCSLSDVYQMEKDIAMEQERNARYRTPKILEPTAFQEPPPKPSRPKYRPPPQTNLLAPKLQFQVPEGLCASSPTLTSPMEYPSPVNSLHTPPLHRHNVFKRHSMREEDFIQPSSREEAQQLWEAEKVKMRQILDKQQKQMVEDYQWLRQEEKSLDPMVYMNDKSPLTPEKEVGYLEFTGPPQKPPRLGAQSIQPTANLDRTDDLVYLNVMELVRAVLELKNELCQLPPEGYVVVVKNVGLTLRKLIGSVDDLLPSLPSSSRTEIEGTQKLLNKDLAELINKMRLAQQNAVTSLSEECKRQMLTASHTLAVDAKNLLDAVDQAKVLANLAHPPAE

SEQ ID NO: 210 - protein, 1009 aa, Homo sapiens
MSGVSEPLSRVKLGTLRRPEGPAEPMVVVPVDVEKEDVRILKVCFYSNSFNPGKNFKLVKCTVQTEIREIITSILLSGRIGPNIRLAECYGLRLKHMKSDEIHWLHPQMTVGEVQDKYECLHVEAEWRYDLQIRYLPEDFMESLKEDRTTLLYFYQQLRNDYMQRYASKVSEGMALQLGCLELRRFFKDMPHNALDKKSNFELLEKEVGLDLFFPKQMQENLKPKQFRKMIQQTFQQYASLREEECVMKFFNTLAGFANIDQETYRCELIQGWNITVDLVIGPKGIRQLTSQDAKPTCLAEFKQIRSIRCLPLEEGQAVLQLGIEGAPQALSIKTSSLAEAENMADLIDGYCRLQGEHQGSLIIHPRKDGEKRNSLPQIPMLNLEARRSHLSESCSIESDIYAEIPDETLRRPGGPQYGIAREYVVLNRILGEGFFGEVYEGVYTNHKGEKINVAVKTCKKDCTLDNKEKFMSEAVIMKNLDHPHIVKLIGIIEEEPTWIIMELYPYGELGHYLERNKNSLKVLTLVLYSLQICKAMAYLESINCVHRDIAVRNILVASPECVKLGDFGLSRYIEDEDYYKASVTRLPIKWMSPESINFRRFTTASDVWMFAVCMWEILSFGKQPFFWLENKDVIGVLEKGDRLPKPDLCPPVLYTLMTRCWDYDPSDRPRFTELVCSLSDVYQMEKDIAMEQERNARYRTPKILEPTAFQEPPPKPSRPKYRPPPQTNLLAPKLQFQVPEGLCASSPTLTSPMEYPSPVNSLHTPPLHRHNVFKRHSMREEDFIQPSSREEAQQLWEAEKVKMRQILDKQQKQMVEDYQWLRQEEKSLDPMVYMNDKSPLTPEKEVGYLEFTGPPQKPPRLGAQSIQPTANLDRTDDLVYLNVMELVRAVLELKNELCQLPPEGYVVVVKNVGLTLRKLIGSVDDLLPSLPSSSRTEIEGTQKLLNKDLAELINKMRLAQQNAVTSLSEECKRQMLTASHTLAVDAKNLLDAVDQAKVLANLAHPPAE

SEQ ID NO: 211 - protein, 1009 aa, Homo sapiens
MSGVSEPLSRVKLGTLRRPEGPAEPMVVVPVDVEKEDVRILKVCFYSNSFNPGKNFKLVKCTVQTEIREIITSILLSGRIGPNIRLAECYGLRLKHMKSDEIHWLHPQMTVGEVQDKYECLHVEAEWRYDLQIRYLPEDFMESLKEDRTTLLYFYQQLRNDYMQRYASKVSEGMALQLGCLELRRFFKDMPHNALDKKSNFELLEKEVGLDLFFPKQMQENLKPKQFRKMIQQTFQQYASLREEECVMKFFNTLAGFANIDQETYRCELIQGWNITVDLVIGPKGIRQLTSQDAKPTCLAEFKQIRSIRCLPLEEGQAVLQLGIEGAPQALSIKTSSLAEAENMADLIDGYCRLQGEHQGSLIIHPRKDGEKRNSLPQIPMLNLEARRSHLSESCSIESDIYAEIPDETLRRPGGPQYGIAREDVVLNRILGEGFFGEVYEGVYTNHKGEKINVAVKTCKKDCTLDNKEKFMSEAVIMKNLDHPHIVKLIGIIEEEPTWIIMELYPYGELGHYLERNKNSLKVLTLVLYSLQICKAMAYLESINCVHRDIAVRNILVASPECVKLGDFGLSRYIEDEDYYKASVTRLPIKWMSPESINFRRFTTASDVWMFAVCMWEILSFGKQPFFWLENKDVIGVLEKGDRLPKPDLCPPVLYTLMTRCWDYDPSDRPRFTELVCSLSDVYQMEKDIAMEQERNARYRTPKILEPTAFQEPPPKPSRPKYRPPPQTNLLAPKLQFQVPEGLCASSPTLTSPMEYPSPVNSLHTPPLHRHNVFKRHSMREEDFIQPSSREEAQQLWQAEKVKMRQILDKQQKQMVEDYQWLRQEEKSLDPMVYMNDKSPLTPEKEVGYLEFTGPPQKPPRLGAQSIQPTANLDRTDDLVYLNVMELVRAVLELKNELCQLPPEGYVVVVKNVGLTLRKLIGSVDDLLPSLPSSSRTEIEGTQKLLNKDLAELINKMRLAQQNAVTSLSEECKRQMLTASHTLAVDAKNLLDAVDQAKVLANLAHPPAE

SEQ ID NO: 212 - protein, 1009 aa, Homo sapiens
MSGVSEPLSRVKLGTLRRPEGPAEPMVVVPVDVEKEDVRILKVCFYSNSFNPGKNFKLVKCTVQTEIREIITSILLSGRIGPNIRLAECYGLRLKHMKSDEIHWLHPQMTVGEVQDKYECLHVEAEWRYDLQIRYLPEDFMESLKEDRTTLLYFYQQLRNDYMQRYASKVSEGMALQLGCLELRRFFKDMPHNALDKKSNFELLEKEVGLDLFFPKQMQENLKPKQFRKMIQQTFQQYASLREEECVMKFFNTLAGFANIDQETYRCELIQGWNITVDLVIGPKGIRQLTSQDAKPTCLAEFKQIRSIRCLPLEEGQAVLQLGIEGAPQALSIKTSSLAEAENMADLIDGYCRLQGEHQGSLIIHPRKDGEKRNSLPQIPMLNLEARRSHLSESCSIESDIYAEIPDETLRRPGGPQYGIAREDVVLNRILGEGFFGEVYEGVYTNHKGEKINVAVKTCKKDCTLDNKEKFMSEAVIMKNLDHPHIVKLIGIIEEEPTWIIMELYPYGELGHYLERNKNSLKVLTLVLYSLQICKAMAYLESINCVHRDIAVRNILVASPECVKLGDFGLSRYIEDEDYYKASVTRLPIKWMSPESINFRRFTTASDVWMFAVCMWEILSFGKQPFFWLENKDVIGVLEKGDRLPKPDLCPPVLYTLMTRCWDYDPSDRPRFTELVCSLSDVYQMEKDIAMEQERNARYRTPKILEPTAFQEPPPKPSRPKYRPPPQTNLLAPKLQFQVPEGLCASSPTLTSPMEYPSPVNSLHTPPLHRHNVFKRHSMREEDFIQPSSREEAQQLWEAEKVKMRQILDKQQKQMVEDYQWLRQEEKSLDPMVYMNDKSPLTPEKEVGYLEFTGPPQKPPRLGAQSIQPTANLDRTDDLVYLNVLELVRAVLELKNELCQLPPEGYVVVVKNVGLTLRKLIGSVDDLLPSLPSSSRTEIEGTQKLLNKDLAELINKMRLAQQNAVTSLSEECKRQMLTASHTLAVDAKNLLDAVDQAKVLANLAHPPAE

SEQ ID NO: 213 - protein, 1009 aa, Homo sapiens
MSGVSEPLSRVKLGTLRRPEGPAEPMVVVPVDVEKEDVRILKVCFYSNSFNPGKNFKLVKCTVQTEIREIITSILLSGRIGPNIRLAECYGLRLKHMKSDEIHWLHPQMTVGEVQDKYECLHVEAEWRYDLQIRYLPEDFMESLKEDRTTLLYFYQQLRNDYMQRYASKVSEGMALQLGCLELRRFFKDMPHNALDKKSNFELLEKEVGLDLFFPKQMQENLKPKQFRKMIQQTFQQYASLREEECVMKFFNTLAGFANIDQETYRCELIQGWNITVDLVIGPKGIRQLTSQDAKPTCLAEFKQIRSIRCLPLEEGQAVLQLGIEGAPQALSIKTSSLAEAENMADLIDGYCRLQGEHQGSLIIHPRKDGEKRNSLPQIPMLNLEARRSHLSESCSIESDIYAEIPDETLRRPGGPQYGIAREDVVLNRILGEGFFGEVYEGVYTNHKGEKINVAVKTCKKDCTLDNKEKFMSEAVIMKNLDHPHIVKLIGIIEEEPTWIIMELYPYGELGHYLERNKNSLKVLTLVLYSLQICKAMAYLESINCVHRDIAVRNILVASPECVKLGDFGLSRYIEDEDYYKASVTRLPIKWMSPESINFRRFTTASDVWMFAVCMWEILSFGKQPFFWLENKDVIGVLEKGDRLPKPDLCPPVLYTLMTRCWDYDPSDRPRFTELVCSLSDVYQMEKDIAMEQERNARYRTPKILEPTAFQEPPPKPSRPKYRPPPQTNLLAPKLQFQVPEGLCASSPTLTSPMEYPSPVNSLHTPPLHRHNVFKRHSMREEDFIQPSSREEAQQLWEAEKVKMRQILDKQQKQMVEDYQWLRQEEKSLDPMVYMNDKSPLTPEKEVGYLEFTGPPQKPPRLGAQSIQPTANLDRTDDLVYLNVMELVRAVLELKNELCQLPPEGYVVVVKNVGLTLRKLIGSVDDLLPSLPSSSRTEIEGTQKLLNKDLAELINKMRLAQQNAVTSLSEECKRQMLMASHTLAVDAKNLLDAVDQAKVLANLAHPPAE

SEQ ID NO: 214 - protein, 1114 aa, Homo sapiens
MAKATSGAAGLRLLLLLLLPLLGKVALGLYFSRDAYWEKLYVDQAAGTPLLYVHALRDAPEEVPSFRLGQHLYGTYRTRLHENNWICIQEDTGLLYLNRSLDHSSWEKLSVRNRGFPLLTVYLKVFLSPTSLREGECQWPGCARVYFSFFNTSFPACSSLKPRELCFPETRPSFRIRENRPPGTFHQFRLLPVQFLCPNISVAYRLLEGEGLPFRCAPDSLEVSTRWALDREQREKYELVAVCTVHAGAREEVVMVPFPVTVYDEDDSAPTFPAGVDTASAVVEFKRKEDTVVATLRVFDADVVPASGELVRRYTSTLLPGDTWAQQTFRVEHWPNETSVQANGSFVRATVHDYRLVLNRNLSISENRTMQLAVLVNDSDFQGPGAGVLLLHFNVSVLPVSLHLPSTYSLSVSRRARRFAQIGKVCVENCQAFSGINVQYKLHSSGANCSTLGVVTSAEDTSGILFVNDTKALRRPKCAELHYMVVATDQQTSRQAQAQLLVTVEGSYVAEEAGCPLSCAVSKRRLECEECGGLGSPTGRCEWRQGDGKGITRNFSTCSPSTKTCPDGHCDVVETQDINICPQDCLRGSIVGGHEPGEPRGIKAGYGTCNCFPEEEKCFCEPEDIQDPLCDELCRTVIAAAVLFSFIVSVLLSAFCIHCYHKFAHKPPISSAEMTFRRPAQAFPVSYSSSGARRPSLDSMENQVSVDAFKILEDPKWEFPRKNLVLGKTLGEGEFGKVVKATAFHLKGRTGYTTVAVKMLKENASPSELRDLLSEFNVLKQVNHPHVIKLYGACSQDGPLLLIVEYAKYGSLRGFLRESRKVGPGYLGSGGSRNSSSLDHPDERALTMGDLISFAWQISQGMQYLAEMKLVHRDLAARNILVAEGRKMKISDFGLSRDVYEEDSYVKRSQGRIPVKWMAIESLFDHIYTTQSDVWSFGVLLWEIVTLGGNPYPGIPPERLFNLLKTGHRMERPDNCSEEMYRLMLQCWKQEPDKRPVFADISKDLEKMMVKRRDYLDLAASTPSDSLIYDDGLSEEETPLVDCNNAPLPRALPSTWIENKLYGMSDPNWPGESPVPLTRADGTNTGFPRYPNDSVYANWMLSPSAAKLMDTFDS

SEQ ID NO: 215 - protein, 595 aa, Homo sapiens
MELLPPLPQSFLLLLLLPAKPAAGEDWQCPRTPYAASRDFDVKYVVPSFSAGGLVQAMVTYEGDRNESAVFVAIRNRLHVLGPDLKSVQSLATGPAGDPGCQTCAACGPGPHGPPGDTDTKVLVLDPALPALVSCGSSLQGRCFLHDLEPQGTAVHLAAPACLFSAHHNRPDDCPDCVASPLGTRVTVVEQGQASYFYVASSLDAAVAGSFSPRSVSIRRLKADASGFAPGFVALSVLPKHLVSYSIEYVHSFHTGAFVYFLTVQPASVTDDPSALHTRLARLSATEPELGDYRELVLDCRFAPKRRRRGAPEGGQPYPVLQVAHSAPVGAQLATELSIAEGQEVLFGVFVTGKDGGPGVGPNSVVCAFPIDLLDTLIDEGVERCCESPVHPGLRRGLDFFQSPSFCPNPPGLEALSPNTSCRHFPLLVSSSFSRVDLFNGLLGPVQVTALYVTRLDNVTVAHMGTMDGRILQVELVRSLNYLLYVSNFSLGDSGQPVQRDVSRLGDHLLFASGDQVFQVPIRGPGCRHFLTCGRCLRAWHFMGCGWCGNMCGQQKECPGSWQQDHCPPKLTEGASADSSATPLWPTGRRHLSHS

SEQ ID NO: 216 - protein, 1400 aa, Homo sapiens
MELLPPLPQSFLLLLLLPAKPAAGEDWQCPRTPYAASRDFDVKYVVPSFSAGGLVQAMVTYEGDRNESAVFVAIRNRLHVLGPDLKSVQSLATGPAGDPGCQTCAACGPGPHGPPGDTDTKVLVLDPALPALVSCGSSLQGRCFLHDLEPQGTAVHLAAPACLFSAHHNRPDDCPDCVASPLGTRVTVVEQGQASYFYVASSLDAAVAGSFSPRSVSIRRLKADASGFAPGFVALSVLPKHLVSYSIEYVHSFHTGAFVYFLTVQPASVTDDPSALHTRLARLSATEPELGDYRELVLDCRFAPKRRRRGAPEGGQPYPVLQVAHSAPVGAQLATELSIAEGQEVLFGVFVTGKDGGPGVGPNSVVCAFPIDLLDTLIDEGVERCCESPVHPGLRRGLDFFQSPSFCPNPPGLEALSPNTSCRHFPLLVSSSFSRVDLFNGLLGPVQVTALYVTRLDNVTVAHMGTMDGRILQVELVRSLNYLLYVSNFSLGDSGQPVQRDVSRLGDHLLFASGDQVFQVPIRGPGCRHFLTCGRCLRAWHFMGCGWCGNMCGQQKECPGSWQQDHCPPKLTEFHPHSGPLRGSTRLTLCGSNFYLHPSGLVPEGTHQVTVGQSPCRPLPKDSSKLRPVPRKDFVEEFECELEPLGTQAVGPTNVSLTVTNMPPGKHFRVDGTSVLRGFSFMEPVLIAVQPLFGPRAGGTCLTLEGQSLSVGTSRAVLVNGTECLLARVSEGQLLCATPPGATVASVPLSLQVGGAQVPGSWTFQYREDPVVLSISPNCGYINSHITICGQHLTSAWHLVLSFHDGLRAVESRCERQLPEQQLCRLPEYVVRDPQGWVAGNLSARGDGAAGFTLPGFRFLPPPHPPSANLVPLKPEEHAIKFEYIGLGAVADCVGINVTVGGESCQHEFRGDMVVCPLPPSLQLGQDGAPLQVCVDGECHILGRVVRPGPDGVPHSTLLGILLPLLLLVAALATALVFSYWWRRKQLVLPPNLNDLASLDQTAGATPLPILYSGSDYRSGLALPAIDGLDSTTCVHGASFSDSEDESCVPLLRKESIQLRDLDSALLAEVKDVLIPHERVVTHSDRVIGKGHFGVVYHGEYIDQAQNRIQCAIKSLSRITEMQQVEAFLREGLLMRGLNHPNVLALIGIMLPPEGLPHVLLPYMCHGDLLQFIRSPQRNPTVKDLISFGLQVARGMEYLAEQKFVHRDLAARNCMLDESFTVKVADFGLARDILDREYYSVQQHRHARLPVKWMALESLQTYRFTTKSDVWSFGVLLWELLTRGAPPYRHIDPFDLTHFLAQGRRLPQPEYCPDSLYQVMQQCWEADPAVRPTFRVLVGEVEQIVSALLGDHYVQLPATYMNLGPSTSHEMNVRPEQPQFSPMPGNVRRPRPLSEPPRPT

SEQ ID NO: 217 - protein, 1331 aa, Homo sapiens
MELLPPLPQSFLLLLLLPAKPAAGEDWQCPRTPYAASRDFDVKYVVPSFSAGGLVQAMVTYEGDRNESAVFVAIRNRLHVLGPDLKSVQSLATGPAGDPGCQTCAACGPGPHGPPGDTDTKVLVLDPALPALVSCGSSLQGRCFLHDLEPQGTAVHLAAPACLFSAHHNRPDDCPDCVASPLGTRVTVVEQGQASYFYVASSLDAAVAGSFSPRSVSIRRLKADASGFAPGFVALSVLPKHLVSYSIEYVHSFHTGAFVYFLTVQPASVTDDPSALHTRLARLSATEPELGDYRELVLDCRFAPKRRRRGAPEGGQPYPVLQVAHSAPVGAQLATELSIAEGQEVLFGVFVTGKDGGPGVGPNSVVCAFPIDLLDTLIDEGVERCCESPVHPGLRRGLDFFQSPSFCPNPPGLEALSPNTSCRHFPLLVSSSFSRVDLFNGLLGPVQVTALYVTRLDNVTVAHMGTMDGRILQVELVRSLNYLLYVSNFSLGDSGQPVQRDVSRLGDHLLFASGDQVFQVPIRGPGCRHFLTCGRCLRAWHFMGCGWCGNMCGQQKECPGSWQQDHCPPKLTEFHPHSGPLRGSTRLTLCGSNFYLHPSGLVPEGTHQVTVGQSPCRPLPKDSSKLRPVPRKDFVEEFECELEPLGTQAVGPTNVSLTVTNMPPGKHFRVDGTSVLRGFSFMEPVLIAVQPLFGPRAGGTCLTLEGQSLSVGTSRAVLVNGTECLLARVSEGQLLCATPPGATVASVPLSLQVGGAQVPGSWTFQYREDPVVLSISPNCGYINSHITICGQHLTSAWHLVLSFHDGLRAVESRCERQLPEQQLCRLPEYVVRDPQGWVAGNLSARGDGAAGFTLPGFRFLPPPHPPSANLVPLKPEEHAIKFEYIGLGAVADCVGINVTVGGESCQHEFRGDMVVCPLPPSLQLGQDGAPLQVCVDGECHILGRVVRPGPDGVPQSTLLGILLPLLLLVAALATALVFSYWWRRKQLVLPPNLNDLASLDQTAGATPLPILYSGSDYRSGLGHFGVVYHGEYIDQAQNRIQCAIKSLSRITEMQQVEAFLREGLLMRGLNHPNVLALIGIMLPPEGLPHVLLPYMCHGDLLQFIRSPQRNPTVKDLISFGLQVARGMEYLAEQKFVHRDLAARNCMLDESFTVKVADFGLARDILDREYYSVQQHRHARLPVKWMALESLQTYRFTTKSDVWSFGVLLWELLTRGAPPYRHIDPFDLTHFLAQGRRLPQPEYCPDSLYQVMQQCWEADPAVRPTFRVLVGEVEQIVSALLGDHYVQLPATYMNLGPSTSHEMNVRPEQPQFSPMPGNVRRPRPLSEPPRPT

SEQ ID NO: 218 - protein, 1080 aa, Homo sapiens
MELLPPLPQSFLLLLLLPAKPAAGEDWQCPRTPYAASRDFDVKYVVPSFSAGGLVQAMVTYEGDRNESAVFVAIRNRLHVLGPDLKSVQSLATGPAGDPGCQTCAACGPGPHGPPGDTDTKVLVLDPALPALVSCGSSLQGRCFLHDLEPQGTAVHLAAPACLFSAHHNRPDDCPDCVASPLGTRVTVVEQGQASYFYVASSLDAAVAGSFSPRSVSIRRLKADASGFAPGFVALSVLPKHLVSYSIEYVHSFHTGAFVYFLTVQPASVTDDPSALHTRLARLSATEPELGDYRELVLDCRFAPKRRRRGAPEGGQPYPVLQVAHSAPVGAQLATELSIAEGQEVLFGVFVTGKDGGPGVGPNSVVCAFPIDLLDTLIDEGVERCCESPVHPGLRRGLDFFQSPSFCPNPPGLEALSPNTSCRHFPLLVSSSFSRVDLFNGLLGPVQVTALYVTRLDNVTVAHMGTMDGRILQVELVRSLNYLLYVSNFSLGDSGQPVQRDVSRLGDHLLFASGDQVFQVPIRGPGCRHFLTCGRCLRAWHFMGCGWCGNMCGQQKECPGSWQQDHCPPKLTEFHPHSGPLRGSTRLTLCGSNFYLHPSGLVPEGTHQVTVGQSPCRPLPKDSSKLRPVPRKDFVEEFECELEPLGTQAVGPTNVSLTVTNMPPGKHFRVDGTSVLRGFSFMEPVLIAVQPLFGPRAGGTCLTLEGQSLSVGTSRAVLVNGTECLLARVSEGQLLCATPPGATVASVPLSLQVGGAQVPGSWTFQYREDPVVLSISPNCGYINSHITICGQHLTSAWHLVLSFHDGLRAVESRCERQLPEQQLCRLPEYVVRDPQGWVAGNLSARGDGAAGFTLPGFRFLPPPHPPSANLVPLKPEEHAIKFEYIGLGAVADCVGINVTVGGESCQHEFRGDMVVCPLPPSLQLGQDGAPLQVCVDGECHILGRVVRPGPDGVPQSTLLGILLPLLLLVAALATALVFSYWWRRKQLVLPPNLNDLASLDQTAGATPLPILYSGSDYRSGLALPAIDGLDSTTCVHGASFSDSEDESCVPLLRKESIQLRDLDSALLAEATLELSTTENT

SEQ ID NO: 219 - protein, 937 aa, Homo sapiens
MHRPRRRGTRPPLLALLAALLLAARGAAAQETELSVSAELVPTSSWNISSELNKDSYLTLDEPMNNITTSLGQTAELHCKVSGNPPPTIRWFKNDAPVVQEPRRLSFRSTIYGSRLRIRNLDTTDTGYFQCVATNGKEVVSSTGVLFVKFGPPPTASPGYSDEYEEDGFCQPYRGIACARFIGNHTVYMESLHMQGEIENQITAAFTMIGTSSHLSDKCSQFAIPSLCHYAFPYCDETSSVPKPRDLCRDECEILENVLCQTEYIFARSNPMILMRLKLPNCEDLPQPESPEAANCIRIGIPMADPINKNHKCYNSTGVDYRGTVSVTKSGRQCQPWNSQYPHTHTFTALRFPELNGGHSYCRNPGNQKEAPWCFTLDENFKSDLCDIPACDSKDSKEKNKMEILYILVPSVAIPLAIALLFFFICVCRNNQKSSSAPVQRQPKHVRGQNVEMSMLNAYKPKSKAKELPLSAVRFMEELGECAFGKIYKGHLYLPGMDHAQLVAIKTLKDYNNPQQWMEFQQEASLMAELHHPNIVCLLGAVTQEQPVCMLFEYINQGDLHEFLIMRSPHSDVGCSSDEDGTVKSSLDHGDFLHIAIQIAAGMEYLSSHFFVHKDLAARNILIGEQLHVKISDLGLSREIYSADYYRVQSKSLLPIRWMPPEAIMYGKFSSDSDIWSFGVVLWEIFSFGLQPYYGFSNQEVIEMVRKRQLLPCSEDCPPRMYSLMTECWNEIPSRRPRFKDIHVRLRSWEGLSSHTSSTTPSGGNATTQTTSLSASPVSNLSNPRYPNYMFPSQGITPQGQIAGFIGPPIPQNQRFIPINGYPIPPGYAAFPAAHYQPTGPPRVIQHCPPPKSRSPSSASGSTSTGHVTSLPSSGSNQEANIPLLPHMSIPNHPGGMGITVFGNKSQKPYKIDSKQASLLGDANIHGHTESMISAEL

SEQ ID NO: 220 - protein, 937 aa, Homo sapiens
MHRPRRRGTRPPLLALLAALLLAARGAAAQETELSVSAELVPTSSWNISSELNKDSYLTLDEPMNNITTSLGQTAELHCKVSGNPPPTIRWFKNDAPVVQEPRRLSFRSTIYGSRLRIRNLDTTDTGYFQCVATNGKEVVSSTGVLFVKFGPPPTASPGYSDEYEEDGFCQPYRGIACARFIGNRTVYMESLHMQGEIENQITAAFTMIGTSSHLSDKCSQFAIPSLCHYAFPYCDETSSVPKPRDLCRDECEILENVLCQTEYIFARSNPMILMRLKLPNCEDLPQPESPEAANCIRIGIPMADPINKNHKCYNSTGVDYRGTVSVTKSGRQCQPWNSQYPHTHTFTALRFPELNGGHSYCRNPGNQKEAPWCFTLDENFKSDLCDIPACDSKDSKEKNKMEILYILVPSVAIPLAIALLFFFICVCQNNQKSSSAPVQRQPKHVRGQNVEMSMLNAYKPKSKAKELPLSAVRFMEELGECAFGKIYKGHLYLPGMDHAQLVAIKTLKDYNNPQQWMEFQQEASLMAELHHPNIVCLLGAVTQEQPVCMLFEYINQGDLHEFLIMRSPHSDVGCSSDEDGTVKSSLDHGDFLHIAIQIAAGMEYLSSHFFVHKDLAARNILIGEQLHVKISDLGLSREIYSADYYRVQSKSLLPIRWMPPEAIMYGKFSSDSDIWSFGVVLWEIFSFGLQPYYGFSNQEVIEMVRKRQLLPCSEDCPPRMYSLMTECWNEIPSRRPRFKDIHVRLRSWEGLSSHTSSTTPSGGNATTQTTSLSASPVSNLSNPRYPNYMFPSQGITPQGQIAGFIGPPIPQNQRFIPINGYPIPPGYAAFPAAHYQPTGPPRVIQHCPPPKSRSPSSASGSTSTGHVTSLPSSGSNQEANIPLLPHMSIPNHPGGMGITVFGNKSQKPYKIDSKQASLLGDANIHGHTESMISAEL

SEQ ID NO: 221 - protein, 937 aa, Homo sapiens
MHRPRRRGTRPPLLALLAALLLAARGAAAQETELSVSAELVPTSSWNISSELNKDSYLTLDEPMNNITTSLGQTAELHCKVSGNPPPTIRWFKNDAPVVQEPRRLSFRSTIYGSRLRIRNLDTTDTGYFQCVATNGKEVVSSTGVLFVKFGPPPTASPGYSDEYEEDGFCQPYRGIACARFIGNRTVYMESLHMQGEIENQITAAFTMIGTSSHLSDKCSQFAIPSLCHYAFPYCDETSSVPKPRDLCRDECEILENVLCQTEYIFARSNPMILMRLKLPNCEDLPQPESPEAANCIRIGIPMADPINKNHKCYNSTGVDYRGTVSVTKSGRQCQPWNSQYPHTHTFTALRFPELNGGHSYCRNPGNQKEAPWCFTLDENFKSDLCDIPACDSKDSKEKNKMEILYILVPSVAIPLAIALLFFFICVCRNNQKSSSAPVQRQPKHVRGQNVEMSMLNAYKPKSKAKELPLSAVRFMEELGECAFGKIYKGHLYLPGMDHAQLVAIKTLKDYNNPQQWMEFQQEASLMAELHHPNIVCLLGAVTQEQPVCMLFEYINQGDLHEFLIMRSPHSDVGCSSDEDGTVKSSLDHGDFLHIAIQIAAGMEYLSSHFFVHKDLAARNILIGEQLHVKISDLGLSREIYSADYYRVQSKSLLPIRWMPPEAIMYGKFSSDSDIWSFGVVLWEIFSFGLQPYYGFSNQEVIEMVRKRQLLPCSEDCPPRMYSLMTECWNEIPSRRPRFKDIHVRLRSWEGLSSHTSSTTPSGGNATTQTTSLSASPVSNLSNPRYPNYMFPSQGITPQGQIAGFIGPPIPQNQRFIPINGYPIPPGYAAFPAAHYQPTGPPRVIQHCPPPKSRSPSSASGSTSTGHVTILPSSGSNQEANIPLLPHMSIPNHPGGMGITVFGNKSQKPYKIDSKQASLLGDANIHGHTESMISAEL

SEQ ID NO: 222 - protein, 937 aa, Homo sapiens
MHRPRRRGTRPPLLALLAALLLAARGAAAQETELSVSAELVPTSSWNISSELNKDSYLTLDEPMNNITTSLGQTAELHCKVSGNPPPTIRWFKNDAPVVQEPRRLSFRSTIYGSRLRIRNLDTTDTGYFQCVATNGKEVVSSTGVLFVKFGPPPTASPGYSDEYEEDGFCQPYRGIACARFIGNRTVYMESLHMQGEIENQITAAFTMIGTSSHLSDKCSQFAIPSLCHYAFPYCDETSSVPKPRDLCRDECEILENVLCQTEYIFARSNPMILMRLKLPNCEDLPQPESPEAANCIRIGIPMADPINKNHKCYNSTGVDYRGTVSVTKSGRQCQPWNSQYPHTHTFTALRFPELNGGHSYCRNPGNQKEAPWCFTLDENFKSDLCDIPACDSKDSKEKNKMEILYILVPSVAIPLAIALLFFFICVCRNNQKSSSAPVQRQPKHVRGQNVEMSMLNAYKPKSKAKELPLSAVRFMEELGECAFGKIYKGHLYLPGMDHAQLVAIKTLKDYNNPQQWMEFQQEASLMAELHHPNIVCLLGAVTQEQPVCMLFEYINQGDLHEFLIMRSPHSDVGCSSDEDGTVKSSLDHGDFLHIAIQIAAGMEYLSSHFFVHKDLAARNILIGEQLHVKISDLGLSREIYSADYYRVQSKSLLPIRWMPPEAIMYGKFSSDSDIWSFGVVLWEIFSFGLQPYYGFSNQEVIEMVRKRQLLPCSEDCPPRMYSLMTECWNEIPSRRPRFKDIHVRLRSWEGLSSHTSSTTPSGGNATTQTTSLSASPVSNLSNPRYPNYMFPSQGITPQGQIAGFIGPPIPQNQRFIPINGYPIPPGYAAFPAAHYQPTGPPRVIQHCPPPKSRSPSSASGSTSTGHVTSLPSSGSNQEANISLLPHMSIPNHPGGMGITVFGNKSQKPYKIDSKQASLLGDANIHGHTESMISAEL

SEQ ID NO: 223 - protein, 943 aa, Homo sapiens [sequence omitted]

SEQ ID NO: 224 - protein, 943 aa, Homo sapiens
MARGSALPRRPLLCIPAVWAAAALLLSVSRTSGEVEVLDPNDPLGPLDGQDGPIPTLKGYFLNFLEPVNNITIVQGQTAILHCKVAGNPPPNVRWLKNDAPVVQEPRRIIIRKTEYGSRLRIQDLDTTDTGYYQCVATNGMKTITATGVLFVRLGPTHSPNHNFQDDYHEDGFCQPYRGIACARFIGNRTIYVDSLQMQGEIENRITAAFTMIGTSTHLSDQCSQFAIPSFCHFVFPLCDARSRTPKPRELCRDECEVLESDLCRQEYTIARSNPLILMRLQLPKCEALPMPESPDAANCMRIGIPAERLGRYHQCYNGSGMDYRGTASTTKSGHQCQPWALQHPHSHHLSSTDFPELGGGHAYCRNPGGQMEGPWCFTQNKNVRMELRDVPSCSPRDSSKMGILYILVPSIAIPLVIACLFFLVCMCRNKQKASASTPQRRQLMASPSQDMEMPLINQHKQAKLKEISLSAVRFMEELGEDRFGKVYKGHLFGPAPGEQTQAVAIKTLKDKAEGPLREEFRHEAMLRARLQHPNVVCLLGVVTKDQPLSMIFSYCSHGDLHEFLVMRSPHSDVGSTDDDRTVKSALEPPDFVHLVAQIAAGMEYLSSHHVVHKDLATRNVLVYDKLNVKISDLGLFREVYAADYYKLLGNSLLPIRWMAPEAIMYGKFSIDSDIWSYGVVLWEVFSYGLQPYCGYSNQDVVEMIRNRQVLPCPDDCPAWVYALMIECWNEFPSRRPRFKDIHSRLRAWGNLSNYNSSAQTSGASNTTQTSSLSTSPVSNVSNARYVGPKQKAPPFPQPQFIPMKGQIRPMVPPPQLYVPVNGYQPVPAYGAYLPNFYPVQIPMQMAPQQVPPQMVPKPSSHHSGSGSTSTGYVTTAPSNTSMADRAALLSEGADDTQNAPEDGAQSTVQEAEEEEEGSVPETELLGDCDTLQVDEAQVQLEA

SEQ ID NO: 225 - protein, 432 aa, Homo sapiens
MARGSALPRRPLLCIPAVWAAAALLLSVSRTSGEVEVLDPNDPLGPLDGQDGPIPTLKGYFLNFLEPVNNITIVQGQTAILHCKVAGNPPPNVRWLKNDAPVVQEPRRIIIRKTEYGSRLRIQDLDTTDTGYYQCVATNGMKTITATGVLFVRLGPTHSPNHNFQDDYHEDGFCQPYRGIACARFIGNRTIYVDSLQMQGEIENRITAAFTMIGTSTHLSDQCSQFAIPSFCHFVFPLCDARSRTPKPRELCRDECEVLESDLCRQEYTIARSNPLILMRLQLPKCEALPMPESPDAANCMRIGIPAERLGRYHQCYNGSGMDYRGTASTTKSGHQCQPWALQHPHSHHLSSTDFPELGGGHAYCRNPGGQMEGPWCFTQNKNVRMELCEWGFCTSWSPASQFHWSSLAFSSWFACAGISRRHLRPHRSGDS

SEQ ID NO: 226 - protein, 943 aa, Homo sapiens
MARGSALPRRPLLCIPAVWAAAALLLSVSRTSGEVEVLDPNDPLGPLDGQDGPIPTLKGYFLNFLEPVNNITIVQGQTAILHCKVAGNPPPNVRWLKNDAPVVQEPRRIIIRKTEYGSRLRIQDLDTTDTGYYQCVATNGMKTITATGVLFVRLGPTHSPNHNFQDDYHEDGFCQPYRGIACARFIGNRTIYVDSLQMQGEIENRITAAFTMIGTSTHLSDQCSQFAIPSFCHFVFPLCDARSRTPKPRELCRDECEVLESDLCRQEYTIARSNPLILMRLQLPKCEALPMPESPDAANCMRIGIPAERLGRYHQCYNGSGMDYRGTASTTKSGHQCQPWALQHPHSHHLSSTDFPELGGGHAYCRNPGGQMEGPWCFTQNKNVRMELCDVPSCSPRDSSKMGILYILVPSIAIPLVIACLFFLVCMCRNKQKASASTPQRRQLMASPSQDMEMPLINQHKQAKLKEISLSAVRFMEELGEDRFGKVYKGHLFGPAPGEQTQAVAIKTLKDKAEGPLREEFRHEAMLRARLQHPNVVCLLGVVTKDQSLSMIFSYCSHGDLHEFLVMRSPHSDVGSTDDDRTVKSALEPPDFVHLVAQIAAGMEYLSSHHVVHKDLATRNVLVYDKLNVKISDLGLFREVYAADYYKLLGNSLLPIRWMAPEAIMYGKFSIDSDIWSYGVVLWEVFSYGLQPYCGYSNQDVVEMIRNRQVLPCPDDCPAWVYALMIECWNEFPSRRPRFKDIHSRLRAWGNLSNYNSSAQTSGASNTTQTSSLSTSPVSNVSNARYVGPKQKAPPFPQPQFIPMKGQIRPMVPPPQLYVPVNGYQPVPAYGAYLPNFYPVQIPMQMAPQQVPPQMVPKPSSHHSGSGSTSTGYVTTAPSNTSMADRAALLSEGADDTQNAPEDGAQSTVQEAEEEEEGSVPETELLGDCDTLQVDEAQVQLEA

SEQ ID NO: 227 - protein, 2347 aa, Homo sapiens
MKNIYCLIPKLVNFATLGCLWISVVQCTVLNSCLKSCVTNLGQQLDLGTPHNLSEPCIQGCHFWNSVDQKNCALKCRESCEVGCSSAEGAYEEEVLENADLPTAPFASSIGSHNMTLRWKSANFSGVKYIIQWKYAQLLGSWTYTKTVSRPSYVVKPLHPFTEYIFRVVWIFTAQLQLYSPPSPSYMTHPHGVPETAPLIRNIESSSPDTVEVSWDPPQFPGGPILGYNLRLISKNQKLDAGTQRTSFQFYSTLPNTIYRFSIAAVNEVGEGPEAESSITTSSSAVQQEEQWLFLSRKTSLRKRSLKHLVDEAHCLRLDAIYHNITGISVDVHQQIVYFSEGTLIWAKKAANMSDVSDLRIFYRGSGLISSISIDWLYQRMYFIMDELVCVCDLENCSNIEEITPPSISAPQKIVADSYNGYVFYLLRDGIYRADLPVPSGRCAEAVRIVESCTLKDFAIKPQAKRIIYFNDTAQVFMSTFLDGSASHLILPRIPFADVKSFACENNDFLVTDGKVIFQQDALSFNEFIVGCDLSHIEEFGFGNLVIFGSSSQLHPLPGRPQELSVLFGSHQALVQWKPPALAIGANVILISDIIELFELGPSAWQNWTYEVKVSTQDPPEVTHIFLNISGTMLNVPELQSAMKYKVSVRASSPKRPGPWSEPSVGTTLVPASEPPFIMAVKEDGLWSKPLNSFGPGEFLSSDIGNVSDMDWYNNSLYYSDTKGDVFVWLLNGTDISENYHLPSIAGAGALAFEWLGHFLYWAGKTYVIQRQSVLTGHTDIVTHVKLLVNDMVVDSVGGYLYWTTLYSVESTRLNGESSLVLQTQPWFSGKKVIALTLDLSDGLLYWLVQDSQCIHLYTAVLRGQSTGDTTITEFAAWSTSEISQNALMYYSGRLFWINGFRIITTQEIGQKTSVSVLEPARFNQFTIIQTSLKPLPGNFSFTPKVIPDSVQESSFRIEGNASSFQILWNGPPAVDWGVVFYSVEFSAHSKFLASEQHSLPVFTVEGLEPYALFNLSVTPYTYWGKGPKTSLSLRAPETVPSAPENPRIFILPSGKCCNKNEVVVEFRWNKPKHENGVLTKFEIFYNISNQSITNKTCEDWIAVNVTPSVMSFQLEGMSPRCFIAFQVRAFTSKGPGPYADVVKSTTSEINPFPHLITLLGNKIVFLDMDQNQVVWTFSAERVISAVCYTADNEMGYYAEGDSLFLLHLHNRSSSELFQDSLVFDITVITIDWISRHLYFALKESQNGMQVFDVDLEHKVKYPREVKIHNRNSTIISFSVYPLLSRLYWTEVSNFGYQMFYYSIISHTLHRILQPTATNQQNKRNQCSCNVTEFELSGAMAIDTSNLEKPLIYFAKAQEIWAMDLEGCQCWRVITVPAMLAGKTLVSLTVDGDLIYWIITAKDSTQIYQAKKGNGAIVSQVKALRSRHILAYSSVMQPFPDKAFLSLASDTVEPTILNATNTSLTIRLPLAKTNLTWYGITSPTPTYLVYYAEVNDRKNSSDLKYRILEFQDSIALIEDLQPFSTYMIQIAVKNYYSDPLEHLPPGKEIWGKTKNGVPEAVQLINTTVRSDTSLIISWRESHKPNGPKESVRYQLAISHLALIPETPLRQSEFPNGRLTLLVTRLSGGNIYVLKVLACHSEEMWCTESHPVTVEMFNTPEKPYSLVPENTSLQFNWKAPLNVNLIRFWVELQKWKYNEFYHVKTSCSQGPAYVCNITNLQPYTSYNVRVVVVYKTGENSTSLPESFKTKAGVPNKPGIPKLLEGSKNSIQWEKAEDNGCRITYYILEIRKSTSNNLQNQNLRWKMTFNGSCSSVCTWKSKNLKGIFQFRVVAANNLGFGEYSGISENIILVGDDFWIPETSFILTIIVGIFLVVTIPLTFVWHRRLKNQKSAKEGVTVLINEDKELAELRGLAAGVGLANACYAIHTLPTQEEIENLPAFPREKLTLRLLLGSGAFGEVYEGTAVDILGVGSGEIKVAVKTLKKGSTDQEKIEFLKEAHLMSKFNHPNILKQLGVCLLNEPQYIILELMEGGDLLTYLRKARMATFYGPLLTLVDLVDLCVDISKGCVYLERMHFIHRDLAARNCLVSVKDYTSPRIVKIGDFGLARDIYKNDYYRKRGEGLLPVRWMAPESLMDGIFTTQSDVWSFGILIWEILTLGHQPYPAHSNLDVLNYVQTGGRLEPPRNCPDDLWNLMTQCWAQEPDQRPTFHRIQDQLQLFRNFFLNSIYKSRDEANNSGVINESFEGEDGDVICLNSDDIMPVALMETKNREGLNYMVLATECGQGEEKSEGPLGSQESESCGLRKEEKEPHADKDFCQEKQVAYCPSGKPEGLNYACLTHSGYGDGSD

SEQ ID NO: 228 - protein, 722 aa, Homo sapiens
  MOD_RES (722)..(722): Any amino acid
MKNIYCLIPKLVNFATLGCLWISVVQCTVLNSCLKSCVTNLGQQLDLGTPHNLSEPCIQGCHFWNSVDQKNCALKCRESCEVGCSSAEGAYEEEVLENADLPTAPFASSIGSHNMTLRWKSANFSGVKYIIQWKYAQLLGSWTYTKTVSRPSYVVKPLHPFTEYIFRVVWIFTAQLQLYSPPSPSYRTHPHGVPETAPLIRNIESSSPDTVEVSWDPPQFPGGPILGYNLRLISKNQKLDAGTQRTSFQFYSTLPNTIYRFSIAAVNEVGEGPEAESSITTSSSAVQQEEQWLFLSRKTSLRKRSLKHLVDEAHCLRLDAIYHNITGISVDVHQQIVYFSEGTLIWAKKAANMSDVSDLRIFYRGSGLISSISIDWLYQRMYFIMDELVCVCDLENCSNIEEITPPSISAPQKIVADSYNGYVFYLLRDGIYRADLPVPSGRCAEAVRIVESCTLKDFAIKPQAKRIIYFNDTAQVFMSTFLDGSASHLILPRIPFADVKSFACENNDFLVTDGKVIFQQDALSFNEFIVGCDLSHIEEFGFGNLVIFGSSSQLHPLPGRPQELSVLFGSHQALVQWKPPALAIGANVILISDIIELFELGPSAWQNWTYEVKVSTQDPPEVTHIFLNISGTMLNVPELQSAMKYKVSVRASSPKRPGPWSEPSVGTTLVPASEPPFIMAVKEDGLWSKPLNSFGPGEFLSSDIGNVSASTTVTRKATFLQX

SEQ ID NO: 229 - protein, 953 aa, Homo sapiens
MKNIYCLIPKLVNFATLGCLWISVVQCTVLNSCLKSCVTNLGQQLDLGTPHNLSEPCIQGCHFWNSVDQKNCALKCRESCEVGCSSAEGAYEEEVLENADLPTAPFASSIGSHNMTLRWKSANFSGVKYIIQWKYAQLLGSWTYTKTVSRPSYVVKPLHPFTEYIFRVVWIFTAQLQLYSPPSPSYRTHPHGVPETAPLIRNIESSSPDTVEVSWDPPQFPGGPILGYNLRLISKNQKLDAGTQRTSFQFYSTLPNTIYRFSIAAVNEVGEGPEAESSITTSSSAVQQEEQWLFLSRKTSLRKRSLKHLVDEAHCLRLDAIYHNITGISVDVHQQIVYFSEGTLIWAKKAANMSDVSDLRIFYRGSGLISSISIDWLYQRMYFIMDELVCVCDLENCSNIEEITPPSISAPQKIVADSYNGYVFYLLRDGIYRADLPVPSGRCAEAVRIVESCTLKDFAIKPQAKRIIYFNDTAQVFMSTFLDGSASHLILPRIPFADVKSFACENNDFLVTDGKVIFQQDALSFNEFIVGCDLSHIEEFGFGNLVIFGSSSQLHPLPGRPQELSVLFGSHQALVQWKPPALAIGANVILISDIIELFELGPSAWQNWTYEVKVSTQDPPEVTHIFLNISGTMLNVPELQSAMKYKVSVRASSPKRPGPWSEPSVGTTLVPASEPPFIMAVKEDGLWSKPLNSFGPGEFLSSDIGNVSDMDWYNNSLYYSDTKGDVFVWLLNGTDISENYHLPSIAGAGALAFEWLGHFLYWAGKTYVIQRQSVLTGHTDIVTHVKLLVNDMVVDSVGGYLYWTTLYSVESTRLNGESSLVLQTQPWFSGKKVIALTLDLSDGLLYWLVQDSQCIHLYTAVLRGLSSWLVNNTLYLYLLWKDWNLMPYLIFLSLLIPTGERAPKHLCHFEHLKQFHQHQRTPEYLYYQVENAATRMKLWWNLGGTNLSMKMGC

SEQ ID NO: 230 - protein, 2347 aa, Homo sapiens
MKNIYCLIPKLVNFATLGCLWISVVQCTVLNSCLKSCVTNLGQQLDLGTPHNLSEPCIQGCHFWNSVDQKNCALKCRESCEVGCSSAEGAYEEEVLENADLPTAPFASSIGSHNMTLRWKSANFSGVKYIIQWKYAQLLGSWTYTKTVSRPSYVVKPLHPFTEYIFRVVWIFTAQLQLYSPPSPSYRTHPHGVPETAPLIRNIESSSPDTVEVSWDPPQFPGGPILGYNLRLISKNQKLDAGTQRTSFQFYSTLPNTIYRFSIAAVNEVGEGPEAESSITTSSSAVQQEEQWLFLSRKTSLRKRSLKHLVDEAHCLRLDAIYHNITGISVDVHQQIVYFSEGTLIWAKKAANMSDVSDLRIFYRGSGLISSISIDWLYQRMYFIMDELVCVCDLENCSNIEEITPPSISAPQKIVADSYNGYVFYLLRDGIYRADLPVPSGRCAEAVRIVESCTLKDFAIKPQAKRIIYFNDTAQVFMSTFLDGSASHLILPRIPFADVKSFACENNDFLVTDGKVIFQQDALSFNEFIVGCDLSHIEEFGFGNLVIFGSSSQLHPLPGRPQELSVLFGSHQALVQWKPPALAIGANVILISDIIELFELGPSAWQNWTYEVKVSTQDPPEVTHIFLNISGTMLNVPELQSAMKYKVSVRASSPKRPGPWSEPSVGTTLVPASEPPFIMAVKEDGLWSKPLNSFGPGEFLSSDIGNVSDMDWYNNSLYYSDTKGDVFVWLLNGTDISENYHLPSIAGAGALAFEWLGHFLYWAGKTYVIQRQSVLTGHTDIVTHVKLLVNDMVVDSVGGYLYWTTLYSVESTRLNGESSLVLQTQPWFSGKKVIALTLDLSDGLLYWLVQDSQCIHLYTAVLRGQSTGDTTITEFAAWSTSEISQNALMYYSGRLFWINGFRIITTQEIGQKTSVSVLEPARFNQFTIIQTSLKPLPGNFSFTPKVIPDSVQESSFRIEGNASSFQILWNGPPAVDWGVVFYSVEFSAHSKFLASEQHSLPVFTVEGLEPYALFNLSVTPYTYWGKGPKTSLSLRAPETVPSAPENPRIFILPSGKCCNKNEVVVEFRWNKPKHENGVLTKFEIFYNISNQSITNKTCEDWIAVNVTPSVMSFQLEGMSPRCFIAFQVRAFTSKGPGPYADVVKSTTSEINPFPHLITLLGNKIVFLDMDQNQVVWTFSAERVISAVCYTADNEMGYYAEGDSLFLLHLHNRSSSELFQDSLVFDITVITIDWISRHLYFALKESQNGMQVFDVDLEHKVKYPREVKIHNRNSTIISFSVYPLLSRLYWTEVSNFGYQMFYYSIISHTLHRILQPTATNQQNKRNQCSCNVTEFELSGAMAIDTSNLEKPLIYFAKAQEIWAMDLEGCQCWRVITVPAMLAGKTLVSLTVDGDLIYWIITAKDSTQIYQAKKGNGAIVSQVKALRSRHILAYSSVMQPFPDKSFLSLASDTVEPTILNATNTSLTIRLPLAKTNLTWYGITSPTPTYLVYYAEVNDRKNSSDLKYRILEFQDSIALIEDLQPFSTYMIQIAVKNYYSDPLEHLPPGKEIWGKTKNGVPEAVQLINTTVRSDTSLIISWRESHKPNGPKESVRYQLAISHLALIPETPLRQSEFPNGRLTLLVTRLSGGNIYVLKVLACHSEEMWCTESHPVTVEMFNTPEKPYSLVPENTSLQFNWKAPLNVNLIRFWVELQKWKYNEFYHVKTSCSQGPAYVCNITNLQPYTSYNVRVVVVYKTGENSTSLPESFKTKAGVPNKPGIPKLLEGSKNSIQWEKAEDNGCRITYYILEIRKSTSNNLQNQNLRWKMTFNGSCSSVCTWKSKNLKGIFQFRVVAANNLGFGEYSGISENIILVGDDFWIPETSFILTIIVGIFLVVTIPLTFVWHRRLKNQKSAKEGVTVLINEDKELAELRGLAAGVGLANACYAIHTLPTQEEIENLPAFPREKLTLRLLLGSGAFGEVYEGTAVDILGVGSGEIKVAVKTLKKGSTDQEKIEFLKEAHLMSKFNHPNILKQLGVCLLNEPQYIILELMEGGDLLTYLRKARMATFYGPLLTLVDLVDLCVDISKGCVYLERMHFIHRDLAARNCLVSVKDYTSPRIVKIGDFGLARDIYKNDYYRKRGEGLLPVRWMAPESLMDGIFTTQSDVWSFGILIWEILTLGHQPYPAHSNLDVLNYVQTGGRLEPPRNCPDDLWNLMTQCWAQEPDQRPTFHRIQDQLQLFRNFFLNSIYKSRDEANNSGVINESFEGEDGDVICLNSDDIMPVALMETKNREGLNYMVLATECGQGEEKSEGPLGSQESESCGLRKEEKEPHADKDFCQEKQVAYCPSGKPEGLNYACLTHSGYGDGSD

SEQ ID NO: 231 - protein, 604 aa, Homo sapiens
MRGAARLGRPGRSCLPGPALRAAAAPALLLARCAVAAAAGLRAAARPRPPELQSASAGPSVSLYLSEDEVRRLIGLDAELYYVRNDLISHYALSFNLLVPSETNFLHFTWHAKSKVEYKLGFQVDNVLAMDMPQVNISVQGEVPRTLSVFRVELSCTGKVDSEVMILMQLNLTVNSSKNFTVLNFKRRKMCYKKLEEVKTSALDKNTSRTIYDPVHAAPTTSTRVFYISVGVCCAVIFLVAIILAVLHLRNMKRIELDDSISASSSSQGLSQPSTQTTQYLRADTPNNATPITSYPTLRIEKNDLRSVTLLEAKGKVKDIAISRERITLKDVLQEGTFGRIFHGILIDEKDPNKEKQAFVKTVKDQASEIQVTMMLTESCKLRGLHHRNLLPITHVCIEEGEKPMVILPYMNWGNLKLFLRQCKLVEANNPQAISQQDLVHMAIQIACGMSYLARREVIHKDLAARNCVIDDTLQVKITDNALSRDLFPMDYHCLGDNENRPVRWMALESLVNNEFSSASDVWAFGVTLWELMTLGQTPYVDIDPFEMAAYLKDGYRIAQPINCPDELFAVMACCWALDPEERPKFQQLVQCLTEFHAALGAYV

SEQ ID NO: 232 - protein, 604 aa, Homo sapiens
MRGAARLGRPGRSCLPGPALRAAAAPALLLARCAVAAAAGLRAAARPRPPELQSASAGPSVSLYLSEDEVRRLIGLDAELYYVRNDLISHYALSFNLLVPSETNFLHFTWHAKSKVEYKLGFQVDNVLAMDMPQVNISVQGEVPRTLSVFRVELSCTGKVDSEVMILMQLNLTVNSSKNFTVLNFKRRKMCYKKLEEVKTSALDKNTSRTIYDPVHAAPTTSTRVFYISVGVCCAVIFLVAIILAVLHLHNMKRIELDDSISASSSSQGLSQPSTQTTQYLRADTPNNATPITSYPTLRIEKNDLRSVTLLEAKGKVKDIAISRERITLKDVLQEGTFGRIFHGILIDEKDPNKEKQAFVKTVKDQASEIQVTMMLTESCKLRGLHHRNLLPITHVCIEEGEKPMVILPYMNWGNLKLFLRQCKLVEANNPQAISQQDLVHMAIQIACGMSYLARREVIHKDLAARNCVIDDTLQVKITDNALSRDLFPMDYHCLGDNENRPVHWMALESLVNNEFSSASDVWAFGVTLWELMTLGQTPYVDIDPFEMAAYLKDGYRIAQPINCPDELFAVMACCWALDPEERPKFQQLVQCLTEFHAALGAYV

SEQ ID NO: 233 - protein, 604 aa, Homo sapiens
MRGAARLGRPGRSCLPGPALRAAAAPALLLARCAVAAAAGLRAAARPRPPELQSASAGPSVSLYLSEDEVRRLIGLDAELYYVRNDLISHYALSFNLLVPSETNFLHFTWHAKSKVEYKLGFQVDNVLAMDMPQVNISVQGEVPRTLSVFRVELSCTGKVDSEVMILMQLNLTVNSSKNFTVLNFKRRKMCYKKLEEVKTSALDKNTSRTIYDPVHAAPTTSTRVFYISVGVCCAVIFLVAIILAVLHLHNMKRIELDDSISASSSSQGLSQPSTQTTQYLRADTPNNATPITSYPTLRIEKNDLRSVTLLEAKGKVKDIAISRERITLKDVLQEGTFGRIFHGILIDEKDPNKEKQAFVKTVKDQASEIQVTMMLTESCKLRGLHHRNLLPITHVCIEEGEKPMVILPYMNWGNLKLFLRQCKLVEANNPQAISQQDLVHMAIQIACGMSYLARREVIHKDLAARNCVIDDTLQVKITDNALSRDLFPMDYHCLGDNENRPVRWMALESLVNNEFSSASDVWAFGVTLWELMTLGQTPYVDIDPFEMAAYLKDGYRITQPINCPDELFAVMACCWALDPEERPKFQQLVQCLTEFHAALGAYV

SEQ ID NO: 234 - protein, 35 aa, Homo sapiens [sequence omitted]

SEQ ID NO: 235 - protein, 635 aa, Homo sapiens
MASSGMADSANHLPFFFGNITREEAEDYLVQGGMSDGLYLLRQSRNYLGGFALSVAHGRKAHHYTIERELNGTYAIAGGRTHASPADLCHYHSQESDGLVCLLKKPFNRPQGVQPKTGPFEDLKENLIREYVKQTWNLQGQALEQAIISQKPQLEKLIATTAHEKMPWFHGKISREESEQIVLIGSKTNGKFLIRARDNNGSYALCLLHEGKVLHYRIDKDKTGKLSIPEGKKFDTLWQLVEHYSYKADGLLRVLTVPCQKLGTQGNVNFGGRPQLPGSHPATWSAGGIISRIKSYSFPKPGHRKSSPAQGNRQESTVSFNPYEPELAPWAADKGPQREALPMDTEVYESPYADPEEIRPKEVYLDRKLLTLEDKELGSGNFGTVKKGYYQMKKVVKTVAVKILKNEANDPALKDELLAEANVMQQLDNPYIVRMIGICEAESWMLVMEMAELGPLNKYLQQNRHVKDKNIIELVHQVSMGMKYLEESNFVHRDLAARNVLLVTQHYAKISDFGLSKALRADENYYKAQTHGKWPVKWYAPECINYYKFSSKSDVWSFGVLMWEAFSYGQKPYRGMKGSEVTAMLEKGERMGCPAGCPREMYDLMNLCWTYDVENRPGFAAVELRLRNYYYDVVN

SEQ ID NO: 236 - protein, 635 aa, Homo sapiens
MASSGMADSANHLPFFFGNITREEAEDYLVQGGMSDGLYLLRQSRNYLGGFALSVAHGRKAHHYTIERELNGTYAIAGGRTHASPADLCHYHSQESDGLVCLLKKPFNRPQGVQPKTGPFEDLKENLIREYVKQTWNLQGQALEQAIISQKPQLEKLIATTAHEKMPWFHGKISREESEQIVLIGSKTNGKFLIRARDNNGSYALCLLHEGKVLHYRIDKDKTGKLSIPEGKKFDTLWQLVEHYSYKADGLLRVLTVPCQKIGTQGNVNFGGRPQLPGSHPATWSAGGIISRIKSYSFPKPGHRKSSPAQGNRQKSTVSFNPYEPELAPWAADKGPQREALPMDTEVYESPYADPEEIRPKEVYLDRKLLTLEDKELGSGNFGTVKKGYYQMKKVVKTVAVKILKNEANDPALKDELLAEANVMQQLDNPYIVRMIGICEAESWMLVMEMAELGPLNKYLQQNRHVKDKNIIELVHQVSMGMKYLEESNFVHRDLAARNVLLVTQHYAKISDFGLSKALRADENYYKAQTHGKWPVKWYAPECINYYKFSSKSDVWSFGVLMWEAFSYGQKPYRGMKGSEVTAMLEKGERMGCPAGCPREMYDLMNLCWTYDVENRPGFAAVELRLRNYYYDVVN

SEQ ID NO: 237 - protein, 635 aa, Homo sapiens
MASSGMADSANHLPFFFGNITREEAEDYLVQGGMSDGLYLLRQSRNYLGGFALSVAHGRKAHHYTIERELNGTYAIAGGRTHASPADLCHYHSQESDGLVCLLKKPFNRPQGVQPKTGPFEDLKENLIREYVKQTWNLQGQALEQAIISQKPQLEKLIATTAHEKMPWFHGKISREESEQIVLIGSKTNGKFLIRARDNNGSYALCLLHEGKVLHYRIDKDKTGKLSIPEGKKFDTLWQLVEHYSYKADGLLRVLTVPCQKIGTQGNVNFGGRPQLPGSHPATWSAGGIISRIKSYSFPKPGHRKSSPAQGNRQESTVSFNPYEPELAPWAADKGPQREALPMDTEVYESPYTDPEEIRPKEVYLDRKLLTLEDKELGSGNFGTVKKGYYQMKKVVKTVAVKILKNEANDPALKDELLAEANVMQQLDNPYIVRMIGICEAESWMLVMEMAELGPLNKYLQQNRHVKDKNIIELVHQVSMGMKYLEESNFVHRDLAARNVLLVTQHYAKISDFGLSKALRADENYYKAQTHGKWPVKWYAPECINYYKFSSKSDVWSFGVLMWEAFSYGQKPYRGMKGSEVTAMLEKGERMGCPAGCPREMYDLMNLCWTYDVENRPGFAAVELRLRNYYYDVVN

SEQ ID NO: 238 - protein, 635 aa, Homo sapiens
MASSGMADSANHLPFFFGNITREEAEDYLVQGGMSDGLYLLRQSRNYLGGFALSVAHGRKAHHYTIERELNGTYAIAGGRTHASPADLCHYHSQESDGLVCLLKKPFNRPQGVQPKTGPFEDLKENLIREYVKQTWNLQGQALEQAIISQKPQLEKLIATTAHEKMPWFHGKISREESEQIVLIGSKTNGKFLIRARDNNGSYALCLLHEGKVLHYRIDKDKTGKLSIPEGKKFDTLWQLVEHYSYKADGLLRVLTVPCQKIGTQGNVNFGGRPQLPGSHPATWSAGGIISRIKSYSFPKPGHRKSSPAQGNRQESTVSFNPYEPELAPWAADKGPQREALPMDTEVYESPYADPEEIRPKEVYLDRKLLTLEDKELGSGNFGTVKKGYYQMKKVVKTVAVKILKNEANDPALKDELLAEANVMQQLDNPYIVRMIGICEAESWMLVMEMAELGPLNKYLQQNRHVKDKNIIELVHQVSMGMKYLEESNFVHRDLAARNVLLVTQHYAKISDFGLSKALSADENYYKAQTHGKWPVKWYAPECINYYKFSSKSDVWSFGVLMWEAFSYGQKPYRGMKGSEVTAMLEKGERMGCPAGCPREMYDLMNLCWTYDVENRPGFAAVELRLRNYYYDVVN

SEQ ID NO: 239 - protein, 635 aa, Homo sapiens
MASSGMADSANHLPFFFGNITREEAEDYLVQGGMSDGLYLLRQSRNYLGGFALSVAHGRKAHHYTIERELNGTYAIAGGRTHASPADLCHYHSQESDGLVCLLKKPFNRPQGVQPKTGPFEDLKENLIREYVKQTWNLQGQALEQAIISQKPQLEKLIATTAHEKMPWFHGKISREESEQIVLIGSKTNGKFLIRARDNNGSYALCLLHEGKVLHYRIDKDKTGKLSIPEGKKFDTLWQLVEHYSYKADGLLRVLTVPCQKIGTQGNVNFGGRPQLPGSHPATWSAGGIISRIKSYSFPKPGHRKSSPAQGNRQESTVSFNPYEPELAPWAADKGPQREALPMDTEVYESPYADPEEIRPKEVYLDRKLLTLEDKELGSGNFGTVKKGYYQMKKVVKTVAVKILKNEANDPALKDELLAEANVMQQLDNPYIVRMIGICEAESWMLVMEMAELGPLNKYLQQNRHVKDKNIIELVHQVSMGMKYLEESNFVHRDLAARNVLLVTQHYAKISDFGLSKALRADENYYKAQTHGKWPVKWYAPECINYYKFSSKSDVWSFGVLMWEAFSYGQKPYRGMKGSEVTAMLEKGERMGCPAGCPREMYDLMNLCWTYDVENRPGFAAAELRLRNYYYDVVN

SEQ ID NO: 240 - protein, 631 aa, Homo sapiens
MNFNTILEEILIKRSQQKKKTSPLNYKERLFVLTKSMLTYYEGRAEKKYRKGFIDVSKIKCVEIVKNDDGVIPCQNKYPFQVVHDANTRYIFAPSPQSRDLWVKKLKEEIKNNNNIMIKYHPKFWTDGSYQCCRQTEKLAPGCEKYNLFESSIRKALPPAPETKKRRPPPPIPLEEEDNSEEIVVAMYDFQAAEGHDLRLERGQEYLILEKNDVHWWRARDKYGNEGYIPSNYVTGKKSNNLDQYEWYCRNMNRSKAEQLLRSEDKEGGFMVRDSSQPGLYTVSLYTKFGGEGSSGFRHYHIKETTTSPKKYYLAEKHAFGSIPEIIEYHKHNAAGLVTRLRYPVSVKGKNAPTTAGFSYEKWEINPSELTFMRELGSGLFGVVRLGKWRAQYKVAIKAIREGAMCEEDFIEEAKVMMKLTHPKLVQLYGVCTQQKPIYIVTEFMERGCLLNFLRQRQGHFSRDVLLSMCQDVCEGMEYLERNSFIHRDLAARNCLVSEAGVVKVSDFGMARYFLDDQYTSSSGAKFPVKWCPPEVFNYSRFSSKSDVWSFGVLMWEVFTEGRMPFEKYTNYEVVTMVTRGHRLYQPKLASNYVYEVMLRCWQEKPEGRPSFEDLLRTIDELVECEETFGR

SEQ ID NO: 241 - protein, 631 aa, Homo sapiens
MNFNTILEEILIKRSQQKKKTSPLNYKERLFVLTKSMLTYYEGRAEKKYRKGFIDVSKIKCVEIVKNDDGVIPCQNKYPFQVVHDANTLYIFAPSPQSRDLWVKKLKEEIKNNNNIMIKYHPKFWTDGSYQCCRQTEKLAPGCEKYNLFESSIRKALPPAPETKKRRPPPPIPLEEEDNSEEIVVAMYDFQAAEGHDLRLERGQEYLILEKNDVHWWRARDKYGNEGYIPSNYVTGKKSNNLDQYEWYCRNMNRSKAEQLLRSEDKEGGFMVRDSSQPGLYTVSLYTKFGGEGSSGFRHYHIKETTTSPKKYYLAEKHAFGSIPEIIEYHKHNAAGLVTRLRYPVSVKGKNAPTTAGFSYEKWEINPSELTFMRELGSGLFGVVRLGKWRAQYKVAIKAIREGAMCEEDFIEEAKVMMKLTHPKLVQLYGVCTQQKPIYIVTEFMERGCLLNFLRQRQGHFSRDVLLSMCQDVCEGMEYLERNSFIHRDLAARNCLVSEAGVVKVSDFGMARYFLDDQYTSSSGAKFPVKRCPPEVFNYSRFSSKSDVWSFGVLMWEVFTEGRMPFEKYTNYEVVTMVTRGHRLYQPKLASNYVYEVMLRCWQEKPEGRPSFEDLLRTIDELVECEETFGR

SEQ ID NO: 242 - protein, 631 aa, Homo sapiens
MNFNTILEEILIKRSQQKKKTSPLNYKERLFVLTKSMLTYYEGRAEKKYRKGFIDVSKIKCVEIVKNDDGVIPCQNKYPFQVVHDANTLYIFAPSPQSRDLWVKKLKEEIKNNNNIMIKYHPKFWTDGSYQCCRQTEKLAPGCEKYNLFESSIRKALPPAPETKKRRPPPPIPLEEEDNSEEIVVAMYDFQAAEGHDLRLERGQEYLILEKNDVHWWRARDKYGNEGYIPSNYVTGKKSNNLDQYEWYCRNMNRSKAEQLLRSEDKEGGFMVRDSSQPGLYTVSLYTKFGGEGSSGFRHYHIKETTTSPKKYYLAEKHAFGSIPEIIEYHKHNAAGLVTRLRYPVSVKGKNAPTTAGFSYEKWEINPSELTFMRELGSGLFGVVRLGKWRAQYKVAIKAIREGAMCEEDFIEEAKVMMKLTHPKLVQLYGVCTQQKPIYIVTEFMERGCLLNFLRQRQGHFSRDVLLSMCQDVCEGMEYLERNSFIHRDLAARNCLVSEAGVVKVSDFGMARYFLDDQYTSSSGAKFPVKWCPPEVFNYSRFSSKSDVWSFGVLMWEVFTEGRMPFEKYTNYEVVTMVTRGHRLYQLKLASNYVYEVMLRCWQEKPEGRPSFEDLLRTIDELVECEETFGR

SEQ ID NO: 243 - protein, 1124 aa, Homo sapiens
MDSLASLVLCGVSLLLSGTVEGAMDLILINSLPLVSDAETSLTCIASGWRPHEPITIGRDFEALMNQHQDPLEVTQDVTREWAKKVVWKREKASKINGAYFCEGRVRGEAIRIRTMKMRQQASFLPATLTMTVDKGDNVNISFKKVLIKEEDAVIYKNGSFIHSVPRHEVPDILEVHLPHAQPQDAGVYSARYIGGNLFTSAFTRLIVRRCEAQKWGPECNHLCTACMNNGVCHEDTGECICPPGFMGRTCEKACELHTFGRTCKERCSGQEGCKSYVFCLPDPYGCSCATGWKGLQCNEACHPGFYGPDCKLRCSCNNGEMCDRFQGCLCSPGWQGLQCEREGIPRMTPKIVDLPDHIEVNSGKFNPICKASGWPLPTNEEMTLVKPDGTVLHPKDFNHTDHFSVAIFTIHRILPPDSGVWVCSVNTVAGMVEKPFNISVKVLPKPLNAPNVIDTGHNFAVINISSEPYFGDGPIKSKKLLYKPVNHYEAWQHIQVTNEIVTLNYLEPRTEYELCVQLVRRGEGGEGHPGPVRRFTTASIGLPPPRGLNLLPKSQTTLNLTWQPIFPSSEDDFYVEVERRSVQKSDQQNIKVPGNLTSVLLNNLHPREQYVVRTRVNTKAQGEWSEDLTAWTLSDILPPQPENIKISNITHSSAVISWTILDGYSISSITIRYKVQGKNEDQHVDVKIKNATITQYQLKGLEPETAYQVDIFAENNIGSSNPAFSHELVTLPESQAPADLGGGKMLLIAILGSAGMTCLTVLLAFLIILQLKRANVQRRMAQAFQNVREEPAVQFNSGTLALNRKVKNNPDPTIYPVLDWNDIKFQDVIGEGNFGQVLKARIKKDGLRMDAAIKRMKEYASKDDHRDFAGELEVLCKLGHHPNIINLLGACEHRGYLYLAIEYAPHGNLLDFLRKSRVLETDPAFAIANSTASTLSSQQLLHFAADVARGMDYLSQKQFIHRDLAARNILVGENYVAKIADFGLSRGQEVYVKKTMGRLPVRWMAIESLNYSVYTTNSDVWSYGVLLWEIVSLGGTPYCGMTCAELYEKLPQGYRLEKPLNCDDEVYDLMRQCWREKPYERPSFAQILVSLNRMLEERKTYVNTTLYEKFTYAGIDCSAEEAA

SEQ ID NO: 244 - protein, 1124 aa, Homo sapiens
MDSLASLVLCGVSLLLSGTVEGAMDLILINSLPLVSDAETSLTCIASGWRPHEPITIGRDFEALMNQHQDPLEVTQDVTREWAKKVVWKREKASKINGAYFCEGRVRGEAIRIRTMKMRQQASFLPATLTMTVDKGDNVNISFKKVLIKEEDAVIYKNGSFIHSVPRHEVPDILEVHLPHAQPQDAGVYSARYIGGNLFTSAFTRLIVRRCEAQKWGPECNHLCTACMNNGVCHEDTGECICPPGFMGRTCEKACELHTFGRTCKERCSGQEGCKSYVFCLPDPYGCSCATGWKGLQCNEACHPGFYGPDCKLRCSCNNGEMCDRFQGCLCSPGWQGLQCEREGIPRMTPKIVDLPDHIEVNSGKFNPICKASGWPLPTNEEMTLVKPDGTVLHPKDFNHTDHFSVAIFTIHRILPPDSGVWVCSVNTVAGMVEKPFNISVKVLPKPLNAPNVIDTGHNFAVINISSEPYFGDGPIKSKKLLYKPVNHYEAWQHIQVTNEIVTLNYLEPRTEYELCVQLVRRGEGGEGHPGPVRRFTTASIGLPPPRGLNLLPKSQTTLNLTWQPIFPSSEDDFYVEVERRSVQKSDQQNIKVPGNLTSVLLNNLHPREQYVVRARVNTKAQGEWSEDLTAWTLSDILPPQPENIKISNITHSSAVISWTILDGYSISSITIRYKVQGKNEDQHVDVKIKNATITQYQLKGLEPETAYQVDIFAENNIGSSNPAFSHELVTLPESQAPADLGGGKMLLIAILGSAGMTCLTVLLAFLIILQLKRANVQRRMAQAFQNVREEPAVQFNSGTLALNRKVKNNPDPTIYPVLDWNDIKFQDVIGEGNFGQVLKARIKKDGLRMDAAIKRMKEYASKDDHRDFAGELEVLCKLGHHPNIINLLGACEHRGYLYLAIEYAPHGNLLDFLRKSRVLETDPAFAIANSTASTLSSQQLLHFAADVARGMDYLSQKQFIHRDLAARNILVGENYVAKIADFGLSRGQEVYVKKTMGRLPVRWMTIESLNYSVYTTNSDVWSYGVLLWEIVSLGGTPYCGMTCAELYEKLPQGYRLEKPLNCDDEVYDLMRQCWREKPYERPSFAQILVSLNRMLEERKTYVNTTLYEKFTYAGIDCSAEEAA

SEQ ID NO: 245 - protein, 1138 aa, Homo sapiens
MVWRVPPFLLPILFLASHVGAAVDLTLLANLRLTDPQRFFLTCVSGEAGAGRGSDAWGPPLLLEKDDRIVRTPPGPPLRLARNGSHQVTLRGFSKPSDLVGVFSCVGGAGARRTRVIYVHNSPGAHLLPDKVTHTVNKGDTAVLSARVHKEKQTDVIWKSNGSYFYTLDWHEAQDGRFLLQLPNVQPPSSGIYSATYLEASPLGSAFFRLIVRGCGAGRWGPGCTKECPGCLHGGVCHDHDGECVCPPGFTGTRCEQACREGRFGQSCQEQCPGISGCRGLTFCLPDPYGCSCGSGWRGSQCQEACAPGHFGADCRLQCQCQNGGTCDRFSGCVCPSGWHGVHCEKSDRIPQILNMASELEFNLETMPRINCAAAGNPFPVRGSIELRKPDGTVLLSTKAIVEPEKTTAEFEVPRLVLADSGFWECRVSTSGGQDSRRFKVNVKVPPVPLAAPRLLTKQSRQLVVSPLVLFSGDGPISTVRLHYRPQDSTMDWSTIVVDPSENVTLMNLRPKTGYSVRVQLSRPGEGGEGAWGPPTLMTTDCPEPLLQPWLEGWHVEGTDRLRVSWSLPLVPGPLVGDGFLLRLWDGTRGQERRENVSSPQARTALLTGLTPGTHYQLDVQLYHCTLLGPASPPAHVLLPPSGPPAPRHLHAQALSDSEIQLTWKHPEALPGPISKYVVEVQVAGGAGDPLWIDVDRPEETSTIIRGLNASTRYLFRMRASIQGLGDWSNTVEESTLGNGLQAEGPVQESRAAEEGLDQQLILAVVGSVSATCLTILAALLTLVCIRRSCLHRRRTFTYQSGSGEETILQFSSGTLTLTRRPKLQPEPLSYPVLEWEDITFEDLIGEGNFGQVIRAMIKKDGLKMNAAIKMLKEYASENDHRDFAGELEVLCKLGHHPNIINLLGACKNRGYLYIAIEYAPYGNLLDFLRKSRVLETDPAFAREHGTASTLSSRQLLRFASDAANGMQYLSEKQFIHRDLAARNVLVGENLASKIADFGLSRGEEVYVKKTMGRLPVRWMAIESLNYSVYTTKSDVWSFGVLLWEIVSLGGTPYCGMTCAELYEKLPQGYRMEQPRNCDDEVYELMRQCWRDRPYERPPFAQIALQLGRMLEARKAYVNMSLFENFTYAGIDATAEEA

SEQ ID NO: 246 - protein, 1138 aa, Homo sapiens
MVWRVPPFLLPILFLASHVGAAVDLTLLANLRLTDPQRFFLTCVSGEAGAGRGSDAWGPPLLLEKDDRIVRTPPGPPLRLARNGSHQVTLRGFSKPSDLVGVFSCVGGAGARRTRVIYVHNSPGAHLLPDKVTHTVNKGDTAVLSARVHKEKQTDVIWKSNGSYFYTLDWHEAQDGRFLLQLPNVQPPSSGIYSATYLEASPLGSAFFRLIVRGCGAGRWGPGCTKECPGCLHGGVCHDHDGECVCPPGFTGTRCEQACREGRFGQSCQEQCPGISGCRGLTFCLPDPYGCSCGSGWRGSQCQEACAPGHFGADCRLQCQCQNGGTCDRFSGCVCPSGWHGVHCEKSDRIPQILNMASELEFNLETMPRINCAAAGNPFPVRGSIELRKPDGTVLLSTKAIVEPEKTTAEFEVPRLVLADSGFWECRVSTSGGQDSRRFKVNVKVPPVPLAAPRLLTKQSRQLVVSPLVSFSGDGPISTVRLHYRPQDSTMDWSTIVVDPSENVTLMNLRPKTGYSVRVQLSRPGEGGEGAWGPPTLMTTDCPEPLLQPWLEGWHVEGTDRLRVSWSLPLVPGPLVGDGFLLRLWDGTRGQERRENVSSPQARTALLTGLTPGTHYQLDVQLYHCTLLGPASPPAHVLLPPSGPPAPRHLHAQALSDSEIQLTWKHPEALPGPISKYVVEVQVAGGAGDPLWIDVDRPEETSTIIRGLNASTRYLFRMRASIQGLGDWSNTVEESTLGNGLQAEGPVQESRAAEEGLDQQLILAVVGSVSATCLTILAALLTLVCIRRSCLHRRRTFTYQSGSGEETILQFSSGTLTLTRRPKLQPEPLSYPVLEWEDITFEDLIGEGNFGQVIRAMIKKDGLKMNAAIKTLKEYASENDHRDFAGELEVLCKLGHHPNIINLLGACKNRGYLYIAIEYAPYGNLLDFLRKSRVLETDPAFAREHGTASTLSSRQLLRFASDAANGMQYLSEKQFIHRDLAARNVLVGENLASKIADFGLSRGEEVYVKKTMGRLPVRWMAIESLNYSVYTTKSDVWSFGVLLWEIVSLGGTPYCGMTCAELYEKLPQGYRMEQPRNCDDEVYELMRQCWRDRPYERPPFAQIALQLGRMLEARKAYVNMSLFENFTYAGIDATAEEA

SEQ ID NO: 247 - protein, 666 aa, Homo sapiens
MLPEAGSLWLLKLLRDIQLAQFYWPILEELNVTRPGHFDFVKPEDLDGIGMGRPAQRRLSEALKSLRSGPKSKNWVYKILGGFAPEHKEPTLPTDSPRHLPEPEGGLKCLIPEGAVCRGELLGSGCFGVVHRGLWTLPSGKSVPVAVKSLRVGPEGPMGTELGDFLREVSVMMNLEHPHVLRLHGLVLGQPLQMVMELAPLGSLHARLTAPAPTPPLLVALLCLFLRQLAGAMAYLGARGLVHRDLATRNLQLASPRTIKVADFGLVRPLGGARGRYVMGGPRPIPYTWCAPESLRHGDFSSASDVWMFGVTLWEMFSGGEEPWPGVPPYLILQRLEDRARLPRPPPSSRALYSLALRCWAPHPADRPSFSHLEGLLQEAGPSEACCVRDATEPGALRMETGDPITVIEGSSSFHSPDSTIWKDQNGRTFKVGSFPASAVTLTDAGGLPATRPVHRGTPARGDQHPGSIDGDRKKANLWDAPPARGQRRNMPLERMKGISRSLESVLSLGPRPTGGGSSPPEIRQARAVPQGPPGLPPRPPLSSSSPQPSQPSRERLPWPERKPPHNHPMGMPGARKAAALSGGLLSDPELQRKIMEMELSVHWVTHQECQTALGATGGDVASAIRNLKVDQLFLLSSRSRADCWRILEHYQWDLSAASRYVLARP

SEQ ID NO: 248 - protein, 1187 aa, Homo sapiens
MPLRHWGMARGSKPVGDGAQPMAAMGGLKVLLHWAGPGGGEPWVTFSESSLTTEEVCIHIAHKVGITPPCFNLFALFDAQAQVWLPPNHILEIPRDASLMLYFRIRFYFRNWHGMNPREPAVYRCGPPGTEASSDQTAQGMQLLDPASFEYLFEQGKHEFVNDVASLWELSTEEEIHHFKNESLGMAFLHLCHLALRHGIPLEEVAKKTSFKDCIPRSFRRHIRQHSALTRLRLRNVFRRFLRDFQPGRLSQQMVMVKYLATLERLAPRFGTERVPVCHLRLLAQAEGEPCYIRDSGVAPTDPGPESAAGPPTHEVLVTGTGGIQWWPVEEEVNKEEGSSGSSGRNPQASLFGKKAKAHKAVGQPADRPREPLWAYFCDFRDITHVVLKEHCVSIHRQDNKCLELSLPSRAAALSFVSLVDGYFRLTADSSHYLCHEVAPPRLVMSIRDGIHGPLLEPFVQAKLRPEDGLYLIHWSTSHPYRLILTVAQRSQAPDGMQSLRLRKFPIEQQDGAFVLEGWGRSFPSVRELGAALQGCLLRAGDDCFSLRRCCLPQPGETSNLIIMRGARASPRTLNLSQLSFHRVDQKEITQLSHLGQGTRTNVYEGRLRVEGSGDPEEGKMDDEDPLVPGRDRGQELRVVLKVLDPSHHDIALAFYETASLMSQVSHTHLAFVHGVCVRGPENIMVTEYVEHGPLDVWLRRERGHVPMAWKMVVAQQLASALSYLENKNLVHGNVCGRNILLARLGLAEGTSPFIKLSDPGVGLGALSREERVERIPWLAPECLPGGANSLSTAMDKWGFGATLLEICFDGEAPLQSRSPSEKEHFYQRQHRLPEPSCPQLATLTSQCLTYEPTQRPSFRTILRDLTRLQPHNLADVLTVNPDSPASDPTVFHKRYLKKIRDLGEGHFGKVSLYCYDPTNDGTGEMVAVKALKADCGPQHRSGWKQEIDILRTLYHEHIIKYKGCCEDQGEKSLQLVMEYVPLGSLRDYLPRHSIGLAQLLLFAQQICEGMAYLHSQHYIHRDLAARNVLLDNDRLVKIGDFGLAKAVPEGHEYYRVREDGDSPVFWYAPECLKEYKFYYASDVWSFGVTLYELLTHCDSSQSPPTKFLELIGIAQGQMTVLRLTELLERGERLPRPDKCPCEVYHLMKNCWETEASFRPTFENLIPILKTVHEKYQGQAPSVFSVC

SEQ ID NO: 249 - protein, 364 aa, Homo sapiens
MPLRHWGMARGSKPVGDGAQPMAAMGGLKVLLHWAGPGGGEPWVTFSESSLTAEEVCIHIAHKVGITPPCFNLFALFDAQAQVWLPPNHILEIPRDASLMLYFRIRFYFRNWHGMNPREPAVYRCGPPGTEASSDQTAQGMQLLDPASFEYLFEQGKHEFVNDVASLWELSTEEEIHHFKNESLGMAFLHLCHLALRHGIPLEEVAKKTSFKDCIPRSFRRHIRQHSALTRLRLRNVFRRFLRDFQPGRLSQQMVMVKYLATLERLAPRFGTERVPVCHLRLLAQAEGEPCYIRDSGVAPTDPGPESAAGPPTHEVLVTGTGGIQWWPVEEEVNKEEGSHLCRPSCGPRTACTSFTGAPATPTA

SEQ ID NO: 250 - protein, 1187 aa, Homo sapiens
MPLRHWGMARGSKPVGDGAQPMAAMGGLKVLLHWAGPGGGEPWVTFSESSLTAEEVCIHIAHKVGITPPCFNLFALFDAQAQVWLPPNHILEIPRDASLMLYFRIRFYFRNWHGMNPREPAVYRCGPPGTEASSDQTAQGMQLLDPASFEYLFEQGKHEFVNDVASLWELSTEEEIHHFKNESLGMAFLHLCHLALRHGIPLEEVAKKTSFKDCIPRSFRRHIRQHSALTRLRLRNVFRRFLRDFQPGRLSQQMVMVKYLATLERLAPRFGTERVPVCHLRLLAQAEGEPCYIRDSGVAPTDPGPESAAGPPTHEVLVTGTGGIQWWPVEEEVNKEEGSSGSSGRNPQASLFGKKAKAHKAVGQPADRPREPLWAYFCDFRDITHVVLKEHCVSIHRQDNKCLELSLPSRAAALSFVSLVDGYFRLTADSSHYLCHEVAPPRLVMSIRDGIHGPLLEPFVQAKLRPEDGLYLIHWSTSHPYRLILTVAQRSQAPDGMQSLRLRKFPIEQQDGAFVLEGWGRSFPSVRELGAALQGCLLRAGDDCFSLRRCCLPQPGETSNLIIMRGARASPRTLNLSQLSFHRVDQKEITQLSHLGQGTRTNVYEGRLRVEGSGDPEEGKMDDEDPLVPGRDRGQELRVVLKVLDPSHHDIALAFYETASLMSQVSHTHLAFVHGVCVRGPENIMVTEYVEHGPLDVWLRTERGHVPMAWKMVVAQQLASALSYLENKNLVHGNVCGRNILLARLGLAEGTSPFIKLSDPGVGLGALSREERVERIPWLAPECLPGGANSLSTAMDKWGFGATLLEICFDGEAPLQSRSPSEKEHFYQRQHRLPEPSCPQLATLTSQCLTYEPTQRPSFRTILRDLTRLQPHNLADVLTVNPDSPASDPTVFHKRYLKKIRDLGEGHFGKVSLYCYDPTNDGTGEMVAVKALKADCGPQHRSGWKQEIDILRTLYHEHIIKYKGCCEDQGEKSLQLVMEYVPLGSLRDYLPRHSIGLAQLLLFAQQICEGMAYLHSQHYIHRDLAARNVLLDNDRLVKIGDFGLAKAVPEGHEYYRVREDGDSPVFWYAPECLKEYKFYYASDVWSFGVTLYELLTHCDSSQSPPTKFLELIGIAQGQMTVLRLTELLERGERLPRPDKCPCEVYHLMKNCWETEASFRPTFENLIPILKTVHEKYQGQAPSVFSVC

SEQ ID NO: 251 - protein, 1187 aa, Homo sapiens
MPLRHWGMARGSKPVGDGAQPMAAMGGLKVLLHWAGPGGGEPWVTFSESSLTAEEVCIHIAHKVGITPPCFNLFALFDAQAQVWLPPNHILEIPRDASLMLYFRIRFYFRNWHGMNPREPAVYRCGPPGTEASSDQTAQGMQLLDPASFEYLFEQGKHEFVNDVASLWELSTEEEIHHFKNESLGMAFLHLCHLALRHGIPLEEVAKKTSFKDCIPRSFRRHIRQHSALTRLRLRNVFRRFLRDFQPGRLSQQMVMVKYLATLERLAPRFGTERVPVCHLRLLAQAEGEPCYIRDSGVAPTDPGPESAAGPPTHEVLVTGTGGIQWWPVEEEVNKEEGSSGSSGRNPQASLFGKKAKAHKAVGQPADRPREPLWAYFCDFRDITHVVLKEHCVSIHRQDNKCLELSLPSRAAALSFVSLVDGYFRLTADSSHYLCHEVAPPRLVMSIRDGIHGPLLEPFVQAKLRPEDGLYLIHWSTSHPYRLILTVAQRSQAPDGMQSLRLRKFPIEQQDGAFVLEGWGRSFPSVRELGAALQGCLLRAGDDCFSLRRCCLPQPGETSNLIIMRGARASPRTLNLSQLSFHRVDQKEITQLSHLGQGTRTNVYEGRLRVEGSGDPEEGKMDDEDPLVPGRDRGQELRVVLKVLDPSHHDIALAFYETASLMSQVSHTHLAFVHGVCVRGPENIMVTEYVEHGPLDVWLRRERGHVPMAWKMVVAQQLASALSYLENKNLVHGNVCGRNILLARLGLAEGTSPFIKLSDPGVGLGALSREERVERIPWLAPECLPGGANSLSTAMDKWGFGATLLEICFDGEAPLQSRSPSEKEHFYQRQHRLPEPSCPQLATLTSQCLTYEPTQRPSFRTILRDLTRLQPHNLADVLTVNPNSPASDPTVFHKRYLKKIRDLGEGHFGKVSLYCYDPTNDGTGEMVAVKALKADCGPQHRSGWKQEIDILRTLYHEHIIKYKGCCEDQGEKSLQLVMEYVPLGSLRDYLPRHSIGLAQLLLFAQQICEGMAYLHSQHYIHRDLAARNVLLDNDRLVKIGDFGLAKAVPEGHEYYRVREDGDSPVFWYAPECLKEYKFYYASDVWSFGVTLYELLTHCDSSQSPPTKFLELIGIAQGQMTVLRLTELLERGERLPRPDKCPCEVYHLMKNCWETEASFRPTFENLIPILKTVHEKYQGQAPSVFSVC

SEQ ID NO: 252 - protein, 1187 aa, Homo sapiens
MPLRHWGMARGSKPVGDGAQPMAAMGGLKVLLHWAGPGGGEPWVTFSESSLTAEEVCIHIAHKVGITPPCFNLFALFDAQAQVWLPPNHILEIPRDASLMLYFRIRFYFRNWHGMNPREPAVYRCGPPGTEASSDQTAQGMQLLDPASFEYLFEQGKHEFVNDVASLWELSTEEEIHHFKNESLGMAFLHLCHLALRHGIPLEEVAKKTSFKDCIPRSFRRHIRQHSALTRLRLRNVFRRFLRDFQPGRLSQQMVMVKYLATLERLAPRFGTERVPVCHLRLLAQAEGEPCYIRDSGVAPTDPGPESAAGPPTHEVLVTGTGGIQWWPVEEEVNKEEGSSGSSGRNPQASLFGKKAKAHKAVGQPADRPREPLWAYFCDFRDITHVVLKEHCVSIHRQDNKCLELSLPSRAAALSFVSLVDGYFRLTADSSHYLCHEVAPPRLVMSIRDGIHGPLLEPFVQAKLRPEDGLYLIHWSTSHPYRLILTVAQRSQAPDGMQSLRLRKFPIEQQDGAFVLEGWGRSFPSVRELGAALQGCLLRAGDDCFSLRRCCLPQPGETSNLIIMRGARASPRTLNLSQLSFHRVDQKEITQLSHLGQGTRTNVYEGRLRVEGSGDPEEGKMDDEDPLVPGRDRGQELRVVLKVLDPSHHDIALAFYETASLMSQVSHTHLAFVHGVCVRGPENIMVTEYVEHGPLDVWLRRERGHVPMAWKMVVAQQLASALSYLENKNLVHGNVCGRNILLARLGLAEGTSPFIKLSDPGVGLGALSREERVERIPWLAPECLPGGANSLSTAMDKWGFGATLLEICFDGEAPLQSRSPSEKEHFYQRQHRLPEPSCPQLATLTSQCLTYEPTQRPSFRTILRDLTRLQPHNLADVLTVNPDSPASDPTVFHKRYLKKIQDLGEGHFGKVSLYCYDPTNDGTGEMVAVKALKADCGPQHRSGWKQEIDILRTLYHEHIIKYKGCCEDQGEKSLQLVMEYVPLGSLRDYLPRHSIGLAQLLLFAQQICEGMAYLHSQHYIHRDLAARNVLLDNDRLVKIGDFGLAKAVPEGHEYYRVREDGDSPVFWYAPECLKEYKFYYASDVWSFGVTLYELLTHCDSSQSPPTKFLELIGIAQGQMTVLRLTELLERGERLPRPDKCPCEVYHLMKNCWETEASFRPTFENLIPILKTVHEKYQGQAPSVFSVC

SEQ ID NO: 253 - protein, 1187 aa, Homo sapiens
MPLRHWGMARGSKPVGDGAQPMAAMGGLKVLLHWAGPGGGEPWVTFSESSLTAEEVCIHIAHKVGITPPCFNLFALFDAQAQVWLPPNHILEIPRDASLMLYFRIRFYFRNWHGMNPREPAVYRCGPPGTEASSDQTAQGMQLLDPASFEYLFEQGKHEFVNDVASLWELSTEEEIHHFKNESLGMAFLHLCHLALRHGIPLEEVAKKTSFKDCIPRSFRRHIRQHSALTRLRLRNVFRRFLRDFQPGRLSQQMVMVKYLATLERLAPRFGTERVPVCHLRLLAQAEGEPCYIRDSGVAPTDPGPESAAGPPTHEVLVTGTGGIQWWPVEEEVNKEEGSSGSSGRNPQASLFGKKAKAHKAVGQPADRPREPLWAYFCDFRDITHVVLKEHCVSIHRQDNKCLELSLPSRAAALSFVSLVDGYFRLTADSSHYLCHEVAPPRLVMSIRDGIHGPLLEPFVQAKLRPEDGLYLIHWSTSHPYRLILTVAQRSQAPDGMQSLRLRKFPIEQQDGAFVLEGWGRSFPSVRELGAALQGCLLRAGDDCFSLRRCCLPQPGETSNLIIMRGARASPRTLNLSQLSFHRVDQKEITQLSHLGQGTRTNVYEGRLRVEGSGDPEEGKMDDEDPLVPGRDRGQELRVVLKVLDPSHHDIALAFYETASLMSQVSHTHLAFVHGVCVRGPENIMVTEYVEHGPLDVWLRRERGHVPMAWKMVVAQQLASALSYLENKNLVHGNVCGRNILLARLGLAEGTSPFIKLSDPGVGLGALSREERVERIPWLAPECLPGGANSLSTAMDKWGFGATLLEICFDGEAPLQSRSPSEKEHFYQRQHRLPEPSCPQLATLTSQCLTYEPTQRPSFRTILRDLTRLQPHNLADVLTVNPDSPASDPTVFHKRYLKKIRDLGEGHFGKVSLYCYDPTNDGTGEMVVVKALKADCGPQHRSGWKQEIDILRTLYHEHIIKYKGCCEDQGEKSLQLVMEYVPLGSLRDYLPRHSIGLAQLLLFAQQICEGMAYLHSQHYIHRDLAARNVLLDNDRLVKIGDFGLAKAVPEGHEYYRVREDGDSPVFWYAPECLKEYKFYYASDVWSFGVTLYELLTHCDSSQSPPTKFLELIGIAQGQMTVLRLTELLERGERLPRPDKCPCEVYHLMKNCWETEASFRPTFENLIPILKTVHEKYQGQAPSVFSVC

SEQ ID NO: 254 - protein, 1187 aa, Homo sapiens
MPLRHWGMARGSKPVGDGAQPMAAMGGLKVLLHWAGPGGGEPWVTFSESSLTAEEVCIHIAHKVGITPPCFNLFALFDAQAQVWLPPNHILEIPRDASLMLYFRIRFYFRNWHGMNPREPAVYRCGPPGTEASSDQTAQGMQLLDPASFEYLFEQGKHEFVNDVASLWELSTEEEIHHFKNESLGMAFLHLCHLALRHGIPLEEVAKKTSFKDCIPRSFRRHIRQHSALTRLRLRNVFRRFLRDFQPGRLSQQMVMVKYLATLERLAPRFGTERVPVCHLRLLAQAEGEPCYIRDSGVAPTDPGPESAAGPPTHEVLVTGTGGIQWWPVEEEVNKEEGSSGSSGRNPQASLFGKKAKAHKAVGQPADRPREPLWAYFCDFRDITHVVLKEHCVSIHRQDNKCLELSLPSRAAALSFVSLVDGYFRLTADSSHYLCHEVAPPRLVMSIRDGIHGPLLEPFVQAKLRPEDGLYLIHWSTSHPYRLILTVAQRSQAPDGMQSLRLRKFPIEQQDGAFVLEGWGRSFPSVRELGAALQGCLLRAGDDCFSLRRCCLPQPGETSNLIIMRGARASPRTLNLSQLSFHRVDQKEITQLSHLGQGTRTNVYEGRLRVEGSGDPEEGKMDDEDPLVPGRDRGQELRVVLKVLDPSHHDIALAFYETASLMSQVSHTHLAFVHGVCVRGPENIMVTEYVEHGPLDVWLRRERGHVPMAWKMVVAQQLASALSYLENKNLVHGNVCGRNILLARLGLAEGTSPFIKLSDPGVGLGALSREERVERIPWLAPECLPGGANSLSTAMDKWGFGATLLEICFDGEAPLQSRSPSEKEHFYQRQHRLPEPSCPQLATLTSQCLTYEPTQRPSFRTILRDLTRLQPHNLADVLTVNPDSPASDPTVFHKRYLKKIRDLGEGHFGKVSLYCYDPTNDGTGEMVAVKALKADCGPQHRSGWKQEIDILRTLYHEHIIKYKGCCEDQGEKSLQLVMEYVPLGSLRDYLPRHSIGLAQLLLFAQQICEGMAYLHSQHYIHRDLAARNVLLDNDRLVKIGDFGLAKAVPEGHEYYRVREDGDSPVFWYAPECLKEYKFYYASDVWSFGVTLYELLTHCDSSQSAPTKFLELIGIAQGQMTVLRLTELLERGERLPRPDKCPCEVYHLMKNCWETEASFRPTFENLIPILKTVHEKYQGQAPSVFSVC

SEQ ID NO: 255 - protein, 890 aa, Homo sapiens
MALRRSMGRPGLPPLPLPPPPRLGLLLAALASLLLPESAAAGLKLMGAPVKLTVSQGQPVKLNCSVEGMEEPDIQWVKDGAVVQNLDQLYIPVSEQHWIGFLSLKSVERSDAGRYWCQVEDGGETEISQPVWLTVEGVPFFTVEPKDLAVPPNAPFQLSCEAVGPPEPVTIVWWRGTTKIGGPAPSPSVLNVTGVTQSTMFSCEAHNLKGLASSRTATVHLQALPAAPFNITVTKLSSSNASVAWMPGADGRALLQSCTVQVTQAPGGWEVLAVVVPVPPFTCLLRDLVPATNYSLRVRCANALGPSPYADWVPFQTKGLAPACAPQNLHAIRTDSGLILEWEEVIPEAPLEGPLGPYKLSWVQDNGTQDELTVEGTRANLTGWDPQKDLIVRVCVSNAVGCGPWSQPLVVSSHDRAGQQGPPHSRTSWVPVVLGVLTALVTAAALALILLRKRRKETRFGQAFDSVMARGEPAVHFRAARSFNRERPERIEATLDSLGISDELKEKLEDVLIPEQQFTLGRMLGKGEFGSVREAQLKQEDGSFVKVAVKMLKADIIASSDIEEFLREAACMKEFDHPHVAKLVGVSLRSRAKGRLPIPMVILPFMKHGDLHAFLLASRIGENPFNLPLQTLIRFMVDIACGMEYLSSRNFIHRDLAARNCMLAEDMTVCVADFGLSRKIYSGDYYRQGCASKLPVKWLALESLADNLYTVQSDVWAFGVTMWEIMTRGQTPYAGIENAEIYNYLIGGNRLKQPPECMEDVYDLMYQCWSADPKQRPSFTCLRMELENILGQLSVLSASQDPLYINIERAEEPTAGGSLELPGRDQPYSGAGDGSGMGAVGGTPSDCRYILTPGGLAEQPGQAEHQPESPLNETQRLLLLQQGLLPHSSC

SEQ ID NO: 256 - protein, 890 aa, Homo sapiens
MALRRSMGRPGLPPLPLPPPPRLGLLLAALASLLLPESAAAGLKLMGAPVKLTVSQGQPVKLNCSVEGMEEPDIQWVKDGAVVQNLDQLYIPVSEQHWIGFLSLKSVERSDAGRYWCQVEDGGETEISQPVWLTVEGVPFFTVEPKDLAVPPNAPFQLSCEAVGPPEPVTIVWWRGTTKIGGPAPSPSVLNVTGVTQSTMFSCEAHNLKGLASSRTATVHLQALPAAPFNITVTKLSSSNASVAWMPGADGRALLQSCTVQVTQAPGGWEVLAVVVPVPPFTCLLRDLVPATNYSLRVRCANALGPSPYADWVPFQTKGLAPASAPQNLHAIRTDSGLILEWEEVIPEAPLEGPLGPYKLSWVQDNGTQDELTVEGTRANLTGWDPQKDLIVRVCVSNAVGCGPWSQPLVVSSHDRAGQQGPPHSRTSWVPVVLGVLTALVTAAALALILLRKRRKETRFGQAFDSVMARGEPAVHFRAARSFNRERPKRIEATLDSLGISDELKEKLEDVLIPEQQFTLGRMLGKGEFGSVREAQLKQEDGSFVKVAVKMLKADIIASSDIEEFLREAACMKEFDHPHVAKLVGVSLRSRAKGRLPIPMVILPFMKHGDLHAFLLASRIGENPFNLPLQTLIRFMVDIACGMEYLSSRNFIHRDLAARNCMLAEDMTVCVADFGLSRKIYSGDYYRQGCASKLPVKWLALESLADNLYTVQSDVWAFGVTMWEIMTRGQTPYAGIENAEIYNYLIGGNRLKQPPECMEDVYDLMYQCWSADPKQRPSFTCLRMELENILGQLSVLSASQDPLYINIERAEEPTAGGSLELPGRDQPYSGAGDGSGMGAVGGTPSDCRYILTPGGLAEQPGQAEHQPESPLNETQRLLLLQQGLLPHSSC

SEQ ID NO: 257 - protein, 890 aa, Homo sapiens
MALRRSMGRPGLPPLPLPPPPRLGLLLAALASLLLPESAAAGLKLMGAPVKLTVSQGQPVKLNCSVEGMEEPDIQWVKDGAVVQNLDQLYIPVSEQHWIGFLSLKSVERSDAGRYWCQVEDGGETEISQPVWLTVEGVPFFTVEPKDLAVPPNAPFQLSCEAVGPPEPVTIVWWRGTTKIGGPAPSPSVLNVTGVTQSTMFSCEAHNLKGLASSRTATVHLQALPAAPFNITVTKLSSSNASVAWMPGADGRALLQSCTVQVTQAPGGWEVLAVVVPVPPFTCLLRDLVPATNYSLRVRCANALGPSPYADWVPFQTKGLAPASAPQNLHAIRTDSGLILEWEEVIPEAPLEGPLGPYKLSWVQDNGTQDELTVEGTRANLTGWDPQKDLIVRVCVSNAVGCGPWSQPLVVSSHDRAGQQGPPHSRTSWVPVVLGVLTALVTAAALALILLRKRRKETRFGQAFDSVMARGEPAVHFRAARSFNRERPERIEATLDSLGISDELKEKLEDVLIPEQQFTLGRMLGKGEFGLVREAQLKQEDGSFVKVAVKMLKADIIASSDIEEFLREAACMKEFDHPHVAKLVGVSLRSRAKGRLPIPMVILPFMKHGDLHAFLLASRIGENPFNLPLQTLIRFMVDIACGMEYLSSRNFIHRDLAARNCMLAEDMTVCVADFGLSRKIYSGDYYRQGCASKLPVKWLALESLADNLYTVQSDVWAFGVTMWEIMTRGQTPYAGIENAEIYNYLIGGNRLKQPPECMEDVYDLMYQCWSADPKQRPSFTCLRMELENILGQLSVLSASQDPLYINIERAEEPTAGGSLELPGRDQPYSGAGDGSGMGAVGGTPSDCRYILTPGGLAEQPGQAEHQPESPLNETQRLLLLQQGLLPHSSC

SEQ ID NO: 258 - protein, 890 aa, Homo sapiens
MALRRSMGRPGLPPLPLPPPPRLGLLLAALASLLLPESAAAGLKLMGAPVKLTVSQGQPVKLNCSVEGMEEPDIQWVKDGAVVQNLDQLYIPVSEQHWIGFLSLKSVERSDAGRYWCQVEDGGETEISQPVWLTVEGVPFFTVEPKDLAVPPNAPFQLSCEAVGPPEPVTIVWWRGTTKIGGPAPSPSVLNVTGVTQSTMFSCEAHNLKGLASSRTATVHLQALPAAPFNITVTKLSSSNASVAWMPGADGRALLQSCTVQVTQAPGGWEVLAVVVPVPPFTCLLRDLVPATNYSLRVRCANALGPSPYADWVPFQTKGLAPASAPQNLHAIRTDSGLILEWEEVIPEAPLEGPLGPYKLSWVQDNGTQDELTVEGTRANLTGWDPQKDLIVRVCVSNAVGCGPWSQPLVVSSHDRAGQQGPPHSRTSWVPVVLGVLTALVTAAALALILLRKRRKETRFGQAFDSVMARGEPAVHFRAARSFNRERPERIEATLDSLGISDELKEKLEDVLIPEQQFTLGRMLGKGEFGSVREAQLKQEDGSFVKVAVKMLKADIIASSDIEEFLREAACMKEFDHPHVAKLVGVSLRSRAKGRLPIPMVILPFMKHGDLHAFLLASRIGENPFNLPLQTLIRFMVDIACGMEYLSSRNFIHRDLAARNCMLAEDMTVCVADFGLSRKIYSGDYYRQGCASKLPVKWLALESLADNLYTVQSDVWAFGVTMWEIMTRGQTPYAGIENAEIYNYLIGGNRLKQPPECMEDVYDLMYQCWSADPKQRPSFTCLRMELETILGQLSVLSASQDPLYINIERAEEPTAGGSLELPGRDQPYSGAGDGSGMGAVGGTPSDCRYILTPGGLAEQPGQAEHQPESPLNETQRLLLLQQGLLPHSSC

SEQ ID NO: 259 - protein, 890 aa, Homo sapiens
MALRRSMGRPGLPPLPLPPPPRLGLLLAALASLLLPESAAAGLKLMGAPVKLTVSQGQPVKLNCSVEGMEEPDIQWVKDGAVVQNLDQLYIPVSEQHWIGFLSLKSVERSDAGRYWCQVEDGGETEISQPVWLTVEGVPFFTVEPKDLAVPPNAPFQLSCEAVGPPEPVTIVWWRGTTKIGGPAPSPSVLNVTGVTQSTMFSCEAHNLKGLASSRTATVHLQALPAAPFNITVTKLSSSNASVAWMPGADGRALLQSCTVQVTQAPGGWEVLAVVVPVPPFTCLLRDLVPATNYSLRVRCANALGPSPYADWVPFQTKGLAPASAPQNLHAIRTDSGLILEWEEVIPEAPLEGPLGPYKLSWVQDNGTQDELTVEGTRANLTGWDPQKDLIVRVCVSNAVGCGPWSQPLVVSSHDRAGQQGPPHSRTSWVPVVLGVLTALVTAAALALILLRKRRKETRFGQAFDSVMARGEPAVHFRAARSFNRERPERIEATLDSLGISDELKEKLEDVLIPEQQFTLGRMLGKGEFGSVREAQLKQEDGSFVKVAVKMLKADIIASSDIEEFLREAACMKEFDHPHVAKLVGVSLRSRAKGRLPIPMVILPFMKHGDLHAFLLASRIGENPFNLPLQTLIRFMVDIACGMEYLSSRNFIHRDLAARNCMLAEDMTVCVADFGLSRKIYSGDYYRQGCASKLPVKWLALESLADNLYTVQSDVWAFGVTMWEIMTRGQTPYAGIENAEIYNYLIGGNRLKQPPECMEDVYDLMYQCWSADPKQRPSFTCLRMELENILGQLSVLSASQDPLYINIERAEEPTAGGSLELLGRDQPYSGAGDGSGMGAVGGTPSDCRYILTPGGLAEQPGQAEHQPESPLNETQRLLLLQQGLLPHSSC

SEQ ID NO: 260 - protein, 1338 aa, Homo sapiens
MVSYWDTGVLLCALLSCLLLTGSSSGSKLKDPELSLKGTQHIMQAGQTLHLQCRGEAAHKWSLPEMVSKESERLSITKSACGRNGKQFCSTLTLNTAQANHTGFYSCKYLAVPTSKKKETESAIYIFISDTGRPFVEMYSEIPEIIHMTEGRELVIPCRVTSPNITVTLKKFPLDTLIPDGKRIIWDSRKGFIISNATYKEIWLLTCEATVNGHLYKTNYLTHRQTNTIIDVQISTPRPVKLLRGHTLVLNCTATTPLNTRVQMTWSYPDEKNKRASVRRRIDQSNSHANIFYSVLTIDKMQNKDKGLYTCRVRSGPSFKSVNTSVHIYDKAFITVKHRKQQVLETVAGKRSYRLSMKVKAFPSPEVVWLKDGLPATEKSARYLTRGYSLIIKDVTEEDAGNYTILLSIKQSNVFKNLTATLIVNVKPQIYEKAVSSFPDPALYPLGSRQILTCTAYGIPQPTIKWFWHPCNHNHSEARCDFCSNNEESFILDADSNMGNRIESITQRMAIIEGKNKMASTLVVADSRISGIYICIASNKVGTVGRNISFYITDVPNGFHVNLEKMPTEGEDLKLSCTVNKFLYRDVTWILLRTVNNRTMHYSISKQKMAITKEHSITLNLTIMNVSLQDSGTYACRARNVYTGEEILQKKEITIRDQEAPYLLRNLSDHTVAISSSTTLDCHANGVPEPQITWFKNNHKIQQEPGIILGPGSSTLFIERVTEEDEGVYHCKATNQKGSVESSAYLTVQGTSDKSNLELITLTCTCVAATLFWLLLTLLIRKMKRSSSEIKTDYLSIIMDPDEVPLDEQCERLPYDASKWEFARERLKLGKSLGRGAFGKVVQASAFGIKKSPTCRTVAVKMLKEGATASEYKALMTELKILTHIGHHLNVVNLLGACTKQGGPLMVIVEYCKYGNLSNYLKSKRDLFFLNKDAALHMEPKKEKMEPGLEQGKKPRLDSVTSSESFASSGFQEDKSLSDVEEEEDSDGFYKEPITMEDLISYSFQVARGMEFLSSRKCIHRDLAARNILLSENNVVKICDFGLARDIYKNPDYVRKGDTRLPLKWMAPESIFDKIYSTKSDVWSYGVLLWEIFSLGGSPYPGVQMDEDFCSRLREGMRMRAPEYSTPEIYQIMLDCWHRDPKERPRFAELVEKLGDLLQANVQQDGKDYIPINAILTGNSGFTYSTPAFSEDFFKESISAPKFNSGSSDDVRYVNAFKFMSLERIKTFEELLPNATSMFDDYQGDSSTLLASPMLKRFTWTDSKPKASLKIDLRVTSKSKESGLSDVSRPSFCHSSCGHVSEGKRRFTYDHAELERKIACCSPPPDYNSVVLYSTPPI

SEQ ID NO: 261 - protein, 1338 aa, Homo sapiens
MVSYWDTGVLLCALLSCLLLTGSSSGSKLKDPELSLKGTQHIMQAGQTLHLQCRGEAAHKWSLPEMVSKESERLSITKSACGRNGKQFCSTLTLNTAQANHTGFYSCKYLAVPTSKKKETESAIYIFISDTGRPFVEMYSEIPEIIHMTEGRELVIPCRVTSPNITVTLKKFPLDTLIPDGKRIIWDSRKGFIISNATYKEIGLLTCEATVNGHLYKTNYLTHRQTNTIIDVQISTPRPVKLLRGHTLVLNCTATTPLNTRVQMTWSYPDEKNKRASVRRRIDQSNSHANIFYSVLTIDKMQNKDKGLYTCRVRSGPSFKSVNTSVHIYDKAFITVKHRKQQVLETVAGKRSYRLSMKVKAFPSPEVVWLKDGLPATEKSARYLTRGYSLIIKDVTEEDAGNYTILLSIKQSNVFKNLTATLIVNVKPQIYEKAVSLFPDPALYPLGSRQILTCTAYGIPQPTIKWFWHPCNHNHSEARCDFCSNNEESFILDADSNMGNRIESITQRMAIIEGKNKMASTLVVADSRISGIYICIASNKVGTVGRNISFYITDVPNGFHVNLEKMPTEGEDLKLSCTVNKFLYRDVTWILLRTVNNRTMHYSISKQKMAITKEHSITLNLTIMNVSLQDSGTYACRARNVYTGEEILQKKEITIRDQEAPYLLRNLSDHTVAISSSTTLDCHANGVPEPQITWFKNNHKIQQEPGIILGPGSSTLFIERVTEEDEGVYHCKATNQKGSVESSAYLTVQGTSDKSNLELITLTCTCVAATLFWLLLTLLIRKMKRSSSEIKTDYLSIIMDPDEVPLDEQCERLPYDASKWEFARERLKLGKSLGRGAFGKVVQASAFGIKKSPTCRTVAVKMLKEGATASEYKALMTELKILTHIGHHLNVVNLLGACTKQGGPLMVIVEYCKYGNLSNYLKSKRDLFFLNKDAALHMEPKKEKMEPGLEQGKKPRLDSVTSSESFASSGFQEDKSLSDVEEEEDSDGFYKEPITMEDLISYSFQVARGMEFLSSRKCIHRDLAARNILLSENNVVKICDFGLARDIYKNPDYVRKGDTRLPLKWMAPESIFDKIYSTKSDVWSYGVLLWEIFSLGGSPYPGVQMDEDFCSRLREGMRMRAPEYSTPEIYQIMLDCWHRDPKERPRFAELVEKLGDLLQANVQQDGKDYIPINAILTGNSGFTYSTPAFSEDFFKESISAPKFNSGSSDDVRYVNAFKFMSLERIKTFEELLPNATSMFDDYQGDSSTLLASPMLKRFTWTDSKPKASLKIDLRVTSKSKESGLSDVSRPSFCHSSCGHVSEGKRRFTYDHAELERKIACCSPPPDYNSVVLYSTPPI

SEQ ID NO: 262 - protein, 1338 aa, Homo sapiens
MVSYWDTGVLLCALLSCLLLTGSSSGSKLKDPELSLKGTQHIMQAGQTLHLQCRGEAAHKWSLPEMVSKESERLSITKSACGRNGKQFCSTLTLNTAQANHTGFYSCKYLAVPTSKKKETESAIYIFISDTGRPFVEMYSEIPEIIHMTEGRELVIPCRVTSPNITVTLKKFPLDTLIPDGKRIIWDSRKGFIISNATYKEIGLLTCEATVNGHLYKTNYLTHRQTNTIIDVQISTPRPVKLLRGHTLVLNCTATTPLNTRVQMTWSYPDEKNKRASVRRRIDQSNSHANIFYSVLTIDKMQNKDKGLYTCRVRSGPSFKSVNTSVHIYDKAFITVKHRKQQVLETVAGKRSYRLSMKVKAFPSPEVVWLKDGLPATEKSARYLTRGYSLIIKDVTEEDAGNYTILLSIKQSNVFKNLTATLIVNVKPQIYEKAVSSFPDPALYPLGSRQILTCTAYGIPQPTIKWFWHPCNHNHSEARCDFCSNNEESFILDADSNMGNRIESITQRMAIIEGKNKMASTLVVADSRISGIYICIASNKVGTVGRNISFYITDVPNGFHVNLEKMPTEGEDLKLSCTVNKFLYRDVTWILLRTVNNRTMHYSISKQKMAITKEHSITLNLTIMNVSLQDSGTYACRARNVYTGEEILQKKEITIRDQEAPYLLRNLSDHTVVISSSTTLDCHANGVPEPQITWFKNNHKIQQEPGIILGPGSSTLFIERVTEEDEGVYHCKATNQKGSVESSAYLTVQGTSDKSNLELITLTCTCVAATLFWLLLTLLIRKMKRSSSEIKTDYLSIIMDPDEVPLDEQCERLPYDASKWEFARERLKLGKSLGRGAFGKVVQASAFGIKKSPTCRTVAVKMLKEGATASEYKALMTELKILTHIGHHLNVVNLLGACTKQGGPLMVIVEYCKYGNLSNYLKSKRDLFFLNKDAALHMEPKKEKMEPGLEQGKKPRLDSVTSSESFASSGFQEDKSLSDVEEEEDSDGFYKEPITMEDLISYSFQVARGMEFLSSRKCIHRDLAARNILLSENNVVKICDFGLARDIYKNPDYVRKGDTRLPLKWMAPESIFDKIYSTKSDVWSYGVLLWEIFSLGGSPYPGVQMDEDFCSRLREGMRMRAPEYSTPEIYQIMLDCWHRDPKERPRFAELVEKLGDLLQANVQQDGKDYIPINAILTGNSGFTYSTPAFSEDFFKESISAPKFNSGSSDDVRYVNAFKFMSLERIKTFEELLPNATSMFDDYQGDSSTLLASPMLKRFTWTDSKPKASLKIDLRVTSKSKESGLSDVSRPSFCHSSCGHVSEGKRRFTYDHAELERKIACCSPPPDYNSVVLYSTPPI

SEQ ID NO: 263 - protein, 1338 aa, Homo sapiens
MVSYWDTGVLLCALLSCLLLTGSSSGSKLKDPELSLKGTQHIMQAGQTLHLQCRGEAAHKWSLPEMVSKESERLSITKSACGRNGKQFCSTLTLNTAQANHTGFYSCKYLAVPTSKKKETESAIYIFISDTGRPFVEMYSEIPEIIHMTEGRELVIPCRVTSPNITVTLKKFPLDTLIPDGKRIIWDSRKGFIISNATYKEIGLLTCEATVNGHLYKTNYLTHRQTNTIIDVQISTPRPVKLLRGHTLVLNCTATTPLNTRVQMTWSYPDEKNKRASVRRRIDQSNSHANIFYSVLTIDKMQNKDKGLYTCRVRSGPSFKSVNTSVHIYDKAFITVKHRKQQVLETVAGKRSYRLSMKVKAFPSPEVVWLKDGLPATEKSARYLTRGYSLIIKDVTEEDAGNYTILLSIKQSNVFKNLTATLIVNVKPQIYEKAVSSFPDPALYPLGSRQILTCTAYGIPQPTIKWFWHPCNHNHSEARCDFCSNNEESFILDADSNMGNRIESITQRMAIIEGKNKMASTLVVADSRISGIYICIASNKVGTVGRNISFYITDVPNGFHVNLEKMPTEGEDLKLSCTVNKFLYRDVTWILLRTVNNRTMHYSISKQKMAITKEHSITLNLTIMNVSLQDSGTYACRARNVYTGEEILQKKEITIRDQEAPYLLRNLSDHTVAISSSTTLDCHANGVPEPQITWFKNNHKIQQEPGIILGPGSSTLFIERVTEEDEGVYHCKATNQKGSVESSAYLTVQGTSDKSNLELITLTCTCVAATLFWLLLTLLIQKMKRSSSEIKTDYLSIIMDPDEVPLDEQCERLPYDASKWEFARERLKLGKSLGRGAFGKVVQASAFGIKKSPTCRTVAVKMLKEGATASEYKALMTELKILTHIGHHLNVVNLLGACTKQGGPLMVIVEYCKYGNLSNYLKSKRDLFFLNKDAALHMEPKKEKMEPGLEQGKKPRLDSVTSSESFASSGFQEDKSLSDVEEEEDSDGFYKEPITMEDLISYSFQVARGMEFLSSRKCIHRDLAARNILLSENNVVKICDFGLARDIYKNPDYVRKGDTRLPLKWMAPESIFDKIYSTKSDVWSYGVLLWEIFSLGGSPYPGVQMDEDFCSRLREGMRMRAPEYSTPEIYQIMLDCWHRDPKERPRFAELVEKLGDLLQANVQQDGKDYIPINAILTGNSGFTYSTPAFSEDFFKESISAPKFNSGSSDDVRYVNAFKFMSLERIKTFEELLPNATSMFDDYQGDSSTLLASPMLKRFTWTDSKPKASLKIDLRVTSKSKESGLSDVSRPSFCHSSCGHVSEGKRRFTYDHAELERKIACCSPPPDYNSVVLYSTPPI

SEQ ID NO: 264 - protein, 1338 aa, Homo sapiens
MVSYWDTGVLLCALLSCLLLTGSSSGSKLKDPELSLKGTQHIMQAGQTLHLQCRGEAAHKWSLPEMVSKESERLSITKSACGRNGKQFCSTLTLNTAQANHTGFYSCKYLAVPTSKKKETESAIYIFISDTGRPFVEMYSEIPEIIHMTEGRELVIPCRVTSPNITVTLKKFPLDTLIPDGKRIIWDSRKGFIISNATYKEIGLLTCEATVNGHLYKTNYLTHRQTNTIIDVQISTPRPVKLLRGHTLVLNCTATTPLNTRVQMTWSYPDEKNKRASVRRRIDQSNSHANIFYSVLTIDKMQNKDKGLYTCRVRSGPSFKSVNTSVHIYDKAFITVKHRKQQVLETVAGKRSYRLSMKVKAFPSPEVVWLKDGLPATEKSARYLTRGYSLIIKDVTEEDAGNYTILLSIKQSNVFKNLTATLIVNVKPQIYEKAVSSFPDPALYPLGSRQILTCTAYGIPQPTIKWFWHPCNHNHSEARCDFCSNNEESFILDADSNMGNRIESITQRMAIIEGKNKMASTLVVADSRISGIYICIASNKVGTVGRNISFYITDVPNGFHVNLEKMPTEGEDLKLSCTVNKFLYRDVTWILLRTVNNRTMHYSISKQKMAITKEHSITLNLTIMNVSLQDSGTYACRARNVYTGEEILQKKEITIRDQEAPYLLRNLSDHTVAISSSTTLDCHANGVPEPQITWFKNNHKIQQEPGIILGPGSSTLFIERVTEEDEGVYHCKATNQKGSVESSAYLTVQGTSDKSNLELITLTCTCVAATLFWLLLTLLIRKMKRSSSEIKTDYLSIIMDPDEVPLDEQCERLPYDASKWEFARERLKLGKSLGRGAFGKVVQASAFGIKKSPTCRTVAVKMLKEGATASEYKALMTELKILTHIGHHLNVVNLLGACTKQGGPLMVIVEYCKYGNLSNYLKSKRDLFFLNKDAALHVEPKKEKMEPGLEQGKKPRLDSVTSSESFASSGFQEDKSLSDVEEEEDSDGFYKEPITMEDLISYSFQVARGMEFLSSRKCIHRDLAARNILLSENNVVKICDFGLARDIYKNPDYVRKGDTRLPLKWMAPESIFDKIYSTKSDVWSYGVLLWEIFSLGGSPYPGVQMDEDFCSRLREGMRMRAPEYSTPEIYQIMLDCWHRDPKERPRFAELVEKLGDLLQANVQQDGKDYIPINAILTGNSGFTYSTPAFSEDFFKESISAPKFNSGSSDDVRYVNAFKFMSLERIKTFEELLPNATSMFDDYQGDSSTLLASPMLKRFTWTDSKPKASLKIDLRVTSKSKESGLSDVSRPSFCHSSCGHVSEGKRRFTYDHAELERKIACCSPPPDYNSVVLYSTPPI

SEQ ID NO: 265 - protein, 1356 aa, Homo sapiens
MQSKVLLAVALWLCVETRAASVGLPSVSLDLPRLSIQKDILTIKANTTLQITCRGQRDLDWLWPNNQSGSEQRVEVTECSDGLFCKTLTIPKVIGNDTGAYKCFYRKTDLASVIYVYVQDYRSPFIASVSDQHGVVYITENKNKTVVIPCLGSISNLNVSLCARYPEKRFVPDGNRISWDSKKGFTIPSYMISYAGMVFCEAKINDESYQSIMYIVVVVGYRIYDVVLSPSHGIELSVGEKLVLNCTARTELNVGIDFNWEYPSSKHQHKKLVNRDLKTQSGSEMKKFLSTLTIDGVTRSDQGLYTCAASSGLMTKKNSTFVRVHEKPFVAFGSGMESLVEATVGERVRIPAKYLGYPPPEIKWYKNGIPLESNHTIKAGHVLTIMEVSERDTGNYTVILTNPISKEKQSHVVSLVVYVPPQIGEKSLISPVDSYQYGTTQTLTCTVYAIPPPHHIHWYWQLEEECANEPSQAVSVTNPYPCEEWRSVEDFQGGNKIEVNKNQFALIEGKNKTVSTLVIQAANVSALYKCEAVNKVGRGERVISFHVTRGPEITLQPDMQPTEQESVSLWCTADRSTFENLTWYKLGPQPLPIHVGELPTPVCKNLDTLWKLNATMFSNSTNDILIMELKNASLQDQGDYVCLAQDRKTKKRHCVVRQLTVLERVAPTITGNLENQTTSIGESIEVSCTASGNPPPQIMWFKDNETLVEDSGIVLKDGNRNLTIRRVRKEDEGLYTCQACSVLGCAKVEAFFIIEGAQEKTNLEIIILVGTAVIAMFFWLLLVIILRTVKRANGGELKTGYLSIVMDPDELPLDEHCERLPYDASKWEFPRDRLKLGKPLGRGAFGQVIEADAFGIDKTATCRTVAVKMLKEGATHSEHRALMSELKILIHIGHHLNVVNLLGACTKPGGPLMVIVEFCKFGNLSTYLRSKRNEFVPYKTKGARFRQGKDYVGAIPVDLKRRLDSITSSQSSASSGFVEEKSLSDVEEEEAPEDLYKDFLTLEHLICYSFQVAKGMEFLASRKCIHRDLAARNILLSEKNVVKICDFGLARDIYKDPDYVRKGDARLPLKWMAPETIFDRVYTIQSDVWSFGVLLWEIFSLGASPYPGVKIDEEFCRRLKEGTRMRAPDYTTPEMYQTMLDCWHGEPSQRPTFSELVEHLGNLLQANAQQDGKDYIVLPISETLSMEEDSGLSLPTSPVSCMEEEEVCDPKFHYDNTAGISQYLQNSKRKSRPVSVKTFEDIPLEEPEVKVIPDDNQTDSGMVLASEELKTLEDRTKLSPSFGGMVPSKSRESVASEGSNQTSGYQSGYHSDDTDTTVYSSEEAELLKLIEIGVQTGSTAQILQPDSGTTLSSPPV

SEQ ID NO: 266 - protein, 1356 aa, Homo sapiens
MQSKVLLAVALWLCVETRAASVGLPSVSLDLPRLSIQKDILTIKANTTLQITCRGQRDLDWLWPNNQSGSEQRVEVTECSDGLFCKTLTIPKVIGNDTGAYKCFYRETDLASVIYVYVQDYRSPFIASVSDQHGVVYITENKNKTVVIPCLGSISNLNVSLCARYPEKRFVPDGNRISWDSKKGFTIPSYMISYAGMVFCEAKINDESYQSIMYIVVVVGYRIYDVVLSPSHGIELSVGEKLVLNCTARTELNVGIDFNWEYPSSKHQHKKLVNRDLKTQSGSEMKKFLSTLTIDGVTRSDQGLYTCAASSGLMTKKNSTFVRVHEKPFVAFGSGMESLVEATVGERVRIPAKYLGYPPPEIKWYKNGIPLESNHTIKAGHVLTIMEVSERDTGNYTVILTNPISKEKQSHVVSLVVYVPPQIGEKSLISPVDSYQYGTTQTLTCTVYAIPPPHHIHWYWQLEEECANEPSQAVSVTNPYPCEEWRSVEDFQGGNKIEVNKNQFALIEGKNKTVSTLVIQAANVSALYKCEAVNKVGRGERVISFHVTRGPEITLQPDMQPTEQESVSLWCTADRSTFENLTWYKLGPQPLPIHVGELPTPVCKNLDTLWKLNATMFSNSTNDILIMELKNASLQDQGDYVCLAQDRKTKKRHCVVRQLTVLERVAPTITGNLENQTTSIGESIEVSCTASGNPPPQIMWFKDNETLVEDSGIVLKDGNRNLTIRRVRKEDEGLYTCQACSVLGCAKVEAFFIIEGAQEKTNLEIIILVGTAVIAMFFWLLLVIILRTVKRANGGELKTGYLSIVMDPDELPLDEHCERLPYDASKWEFPRDRLKLGKPLGRGAFGQVIEADAFGIDKTATCRTVAVKMLKEGATHSEHRALMSELKILIHIGHHLNVVNLLGACTKPGGPLMVIVEFCKFGNLSTYLRSKRNEFVPYKTKGARFRQGKDYVGAIPVDLKRRLDSITSSQSSASSGFVEEKSLSDVEEEEAPEDLYKDFLTLEHLICYSFQVAKGMEFLASRKCIHRDLAARNILLSEKNVVKICDFGLARDIYKDPDYVRKGDARLPLKWMAPETIFDRVYTIQSDVWSFGVLLWEIFSLGASPYPGVKIDEEFCRRLKEGTRMRAPDYTTPEMYQTMLDCWHGEPSQRPTFSELVEHLGNLLQANAQQDGKDYIVLPISETLSMEEDSGLSLPTSPVSCMEEEEVCDPKFHYDNTAGISQYLQNSKRKSRPVSVKTFEDIPLEEPEVKVIPDDNQTDSGMVLASEELKTLEDRTKLSSSFGGMVPSKSRESVASEGSNQTSGYQSGYHSDDTDTTVYSSEEAELLKLIEIGVQTGSTAQILQPDSGTTLSSPPV

SEQ ID NO: 267 - protein, 543 aa, Homo sapiens [sequence omitted]

SEQ ID NO: 268 - protein, 619 aa, Homo sapiens
MPDPAAHLPFFYGSISRAEAEEHLKLAGMADGLFLLRQCLRSLGGYVLSLVHDVRFHHFPIERQLNGTYAIAGGKAHCGPAELCEFYSRDPDGLPCNLRKPCNRPSGLEPQPGVFDCLRDAMVRDYVRQTWKLEGEALEQAIISQAPQVEKLIAMTAHERMPWYHSSLTREEAERKLYSGAQTDGKFLLRPRKEQGTYALSLIYGKTVYHYLISQDKAGKYCIPEGTKFDTLWQLVEYLKLKADGLIYCLKEACPNSSASNASGAAAPTLPAHPSTLTHPQRRIDTLNSDGYTPEPARITSPDKPRPMPMDTSVYESPYSDPEELKDKKLFLKRDNLLIADIELGCGNFGSVRQGVYRMRKKQIDVAIKVLKQGTEKADTEEMMREAQIMHQLDNPYIVRLIGVCQAEALMLVMEMAGGGPLHKFLVGKREEIPVSNVAELLHQVSMGMKYLEEKNFVHRDLAARNVLLVNRHYAKISDFGLSKALGADDSYYTARSAGKWPLKWYAPECINFRKFSSRSDVWSYGVTMWEALSYGQKPYKKMKGPEVMAFIEQGKRMECPPECPPELYALMSDCWIYKWEDRPDFLTVEQRMRACYYSLASKVEGPPGSTQKAEAACA

SEQ ID NO: 269 - protein, 619 aa, Homo sapiens
MPDPAAHLPFFYGSISRAEAEEHLKLAGMADGLFLLRQCLRSLGGYVLSLVHDVRFHHFPIERQLNGTYAIAGGKAHCGPAELCEFYSRDPDGLPCNLRKPCNRPSGLEPQPGVFDCLRDAMVRDYVRQTWKLEGEALEQAIISQAPQVEKLIATTAHERMPWYHSSLTREEAERKLYSGAQTDGKFLLRPRKEQGTYALSLIYGKTVYHYLISQDKAGKYCIPEGTKFDTLWQLVEYLKLKADGLIYCLKEACPNSSASNASGAAAPTLPAHPSTLTHPQRRIDTLNSDGYTPEPARITSPDKPRPMPMDTSVYESPYSDPEELKDKKLFLKRDNLLIADIELGCGNFGSVRQGVYRMRKKQIDVAIKVLKQGTEKADTEEMMREAQIMHQLDNPYIVRLIGVCQAEALMLVMEMAGGGPLHKFLVGKREEIPVSNVAELLHQVSMGMKYLEEKNFVHRDLAARNVLLVNRHYAKISDFGLSKALGADDSYYTARSAGKWPLKWYAPECINFRKFSSRSDVWSYGVTMWEALSYGQKPYKKMKGPEVVAFIEQGKRMECPPECPPELYALMSDCWIYKWEDRPDFLTVEQRMRACYYSLASKVEGPPGSTQKAEAACA

SEQ ID NO: 270 - DNA, 3816 bp, Homo sapiens
atggccaagcagcctgggcgctcagtgcagctcctcaagtccacagacgtgggccggcacagcctcctgtacctgaaggaaatcggccgtggctggttcgggaaggtgttcctgggggaggtgaactctggcatcagcagtgcccaggtggtggtgaaggagctgcaggctagtgccagcgtgcaggagcagatgcagttcctggaggaggtgcagccctacagggccctgaagcacagcaacctgctccagtgcctggcccagtgcgccgaggtgacgccctacctgctggtgatggagttctgcccactgggggacctcaagggctacctgcggagctgccgggtggcggagtccatggctcccgacccccggaccctgcagcgcatggcctgtgaggtggcctgtggcgtcctgcaccttcatcgcaacaatttcgtgcacagcgacctggccctgcggaactgcctgctcacggctgacctgacggtgaagattggtgactatggcctggctcactgcaagtacagagaggactacttcgtgactgccgaccagctgtgggtgcctctgcgctggatcgcgccagagctggtggacgaggtgcatagcaacctgctcgtcgtggaccagaccaagagcgggaatgtgtggtccctgggcgtgaccatctgggagctctttgagctgggcacgcagccctatccccagcactcggaccagcaggtgctggcgtacacggtccgggagcagcagctcaagctgcccaagccccagctgcagctgaccctgtcggaccgctggtacgaggtgatgcagttctgctggctgcagcccgagcagcggcccacagccgaggaggtgcacctgctgctgtcctacctgtgtgccaagggcgccaccgaagcagaggaggagtttgaacggcgctggcgctctctgcggcccggcgggggcggcgtggggcccgggcccggtgcggcggggcccatgctgggcggcgtggtggagctcgccgctgcctcgtccttcccgctgctggagcagttcgcgggcgacggcttccacgcggacggcgacgacgtgctgacggtgaccgagaccagccgaggcctcaattttgagtacaagtgggaggcgggccgcggcgcggaggccttcccggccacgctgagccctggccgcaccgcacgcctgcaggagctgtgcgcccccgacggcgcgcccccgggcgtggttccggtgctcagcgcgcacagcccgtcgctgggcagcgagtacttcatccgcctagaggaggccgcacccgccgccggccacgaccctgactgcgccggctgcgcccccagtccacctgccaccgcggaccaggacgacgactctgacggcagcaccgccgcctcgctggccatggagccgctgctgggccacgggccacccgtcgacgtcccctggggccgcggcgaccactaccctcgcagaagcttggcgcgggacccgctctgcccctcacgctctccctcgccctcggcggggcccctgagtctggcggagggaggagcggaggatgcagactggggcgtggccgccttctgtcctgccttcttcgaggacccactgggcacgtcccctttggggagctcaggggcgcccccgctgccgctgactggcgaggatgagctagaggaggtgggagcgcggagggccgcccagcgcgggcactggcgctccaacgtgtcagccaacaacaacagcggcagccgctgtccagagtcctgggaccccgtctctgcgggcggccacgctgagggctgccccagtccaaagcagaccccacgggcctcccccgagccggggtaccctggagagcctctgcttgggctccaggcagcctctgcccaggagccaggctgctgccccggcctccctcatctatgctctgcccagggcctggcacctgctccctgcctggttacaccctcctggacagagacagccagtagtgggggtgaccacccgcaggcagagcccaagcttgccacggaggctgagggcactaccggaccccgcctgccccttccttccgtcccctccccatcccaggagggagccccacttccctcggaggaggccagtgcccccgacgcccctgatgccctgcctgactctcccacgcctgctactggtggcgaggtgtctgccatcaagctggcttctgccctgaatggcagcagcagctctcccgaggtggaggcacccagcagtgaggatgaggacacggccgaggccacctcaggcatcttcaccgacacgtccagcgacggcctgcaggccaggaggccggatgtggtgccagccttccgctctctgcagaagcaggtggggacccccgactccctggactccctggacatcccgtcctcagccagtgatggtggctatgaggtcttcagcccgtcggccactggcccctctggagggcagccgcgagcgctggacagtggctatgacaccgagaactatgagtcccctgagtttgtgctcaaggaggcgcaggaagggtgtgagccccaggcctttgcggagctggcctcagagggtgagggccccgggcccgagacacggctctccacctccctcagtggcctcaacgagaagaatccctaccgagactctgcctacttctcagacctcgaggctgaggccgaggccacctcaggcccagagaagaagtgcggcggggaccgagcccccgggccagagctgggcctgccgagcactgggcagccgtctgagcaggtctgtctcaggcctggggtttccggggaggcacaaggctctggccccggggaggtgctgcccccactgctgcagcttgaagggtcctccccagagcccagcacctgcccctcgggcctggtcccagagcctccggagccccaaggcccagccaaggtgcggcctgggcccagccccagctgctcccagtttttcctgctgaccccggttccgctgagatcagaaggcaacagctctgagttccaggggcccccaggactgttgtcagggccggccccacaaaagcggatggggggcccaggcacccccagagccccactccgcctggctctgcccggcctccctgcggccttggagggccggccggaggaggaggaggaggacagtgaggacagcgacgagtctgacgaggagctccgctgctacagcgtccaggagcctagcgaggacagcgaagaggaggcgccggcggtgcccgtggtggtggctgagagccagagcgcgcgcaacctgcgcagcctgctcaagatgcccagcctgctgtccgagaccttctgcgaggacctggaacgcaagaagaaggccgtgtccttcttcgacgacgtcaccgtctacctctttgaccaggaaagccccacccgggagctcggggagcccttcccgggcgccaaggaatcgccccctacgttccttagggggagccccggctctcccagcgcccccaaccggccgcagcaggctgatggctccccaaatggctccacagcggaagagggtggtgggtgcgcgtgggacgacgacttcccgctgatgacggccaaggcagccttcgccatggccctagacccggccgcacccgccccggctgcgcccacgcccacgcccgctcccttctcgcgcttcacggtgtcgcccgcgcccacgtcccgcttctccatcacgcacgtgtctgactcggacgccgagtccaagagaggacctgaagctggtgccgggggtgagagtaaagaggcttga

SEQ ID NO: 271 - DNA, 3450 bp, Homo sapiens
atggggcagcagcctggaaaagtacttggggaccaaagaaggccaagcttgcctgccctgcattttatcaaaggagcagggaagaaggaatcatcgaggcatgggggtccacactgcaatgtttttgtggaacatgaagcccttcagcggccagtagcatctgactttgagcctcagggtctgagtgaagccgctcgttggaactccaaggaaaaccttctcgctggacccagtgaaaatgaccccaaccttttcgttgcactgtatgattttgtggccagtggagataacactctaagcataactaaaggtgaaaagctccgggtcttaggctataatcacaatggggaatggtgtgaagcccaaaccaaaaatggccaaggctgggtcccaagcaactacatcacgccagtcaacagtctggagaaacactcctggtaccatgggcctgtgtcccgcaatgccgctgagtatctgctgagcagcgggatcaatggcagcttcttggtgcgtgagagtgagagcagtcctggccagaggtccatctcgctgagatacgaagggagggtgtaccattacaggatcaacactgcttctgatggcaagctctacgtctcctccgagagccgcttcaacaccctggccgagttggttcatcatcattcaacggtggccgacgggctcatcaccacgctccattatccagccccaaagcgcaacaagcccactgtctatggtgtgtcccccaactacgacaagtgggagatggaacgcacggacatcaccatgaagcacaagctgggcgggggccagtacggggaggtgtacgagggcgtgtggaagaaatacagcctgacggtggccgtgaagaccttgaaggaggacaccatggaggtggaagagttcttgaaagaagctgcagtcatgaaagagatcaaacaccctaacctggtgcagctccttggggtctgcacccgggagcccccgttctatatcatcactgagttcatgacctacgggaacctcctggactacctgagggagtgcaaccggcaggaggtgaacgccgtggtgctgctgtacatggccactcagatctcgtcagccatggagtacctggagaagaaaaacttcatccacagagatcttgctgcccgaaactgcctggtaggggagaaccacttggtgaaggtagctgattttggcctgagcaggttgatgacaggggacacctacacagcccatgctgaagccaagttccccatcaaatggactgcacccgagagcctggcctacaacaagttctccatcaagtccgacgtctgggcatttggagtattgctttgggaaattgctacctatggcatgtccccttacccgggaattgacctgtcccaggtgtatgagctgctagagaaggactaccgcatggagcgcccagaaggctgcccagagaaggtctatgaactcatgcgagcatgttggcagtggaatccctctgaccggccctcctttgctgaaatccaccaagcctttgaaacaatgttccaggaatccagtatctcagacgaagtggaaaaggagctggggaaacaaggcgtccgtggggctgtgagtaccttgctgcaggccccagagctgcccaccaagacgaggacctccaggagagctgcagagcacagagacaccactgacgtgcctgagatgcctcactccaagggccagggagagagcgatcctctggaccatgagcctgccgtgtctccattgctccctcgaaaagagcgaggtcccccggagggcggcctgaatgaagatgagcgccttctccccaaagacaaaaagaccaacttgttcagcgccttgatcaagaagaagaagaagacagccccaacccctcccaaacgcagcagctccttccgggagatggacggccagccggagcgcagaggggccggcgaggaagagggccgagacatcagcaacggggcactggctttcacccccttggacacagctgacccagccaagtccccaaagcccagcaatggggctggggtccccaatggagccctccgggagtccgggggctcaggcttccggtctccccacctgtggaagaagtccagcacgctgaccagcagccgcctagccaccggcgaggaggagggcggtggcagctccagcaagcgcttcctgcgctcttgctccgcctcctgcgttccccatggggccaaggacacggagtggaggtcagtcacgctgcctcgggacttgcagtccacgggaagacagtttgactcgtccacatttggagggcacaaaagtgagaagccggctctgcctcggaagagggcaggggagaacaggtctgaccaggtgacccgaggcacagtaacgcctccccccaggctggtgaaaaagaatgaggaagctgctgatgaggtcttcaaagacatcatggagtccagcccgggctccagcccgcccaacctgactccaaaacccctccggcggcaggtcaccgtggcccctgcctcgggcctcccccacaaggaagaagctggaaagggcagtgccttagggacccctgctgcagctgagccagtgacccccaccagcaaagcaggctcaggtgcaccagggggcaccagcaagggccccgccgaggagtccagagtgaggaggcacaagcactcctctgagtcgccagggagggacaaggggaaattgtccaggctcaaacctgccccgccgcccccaccagcagcctctgcagggaaggctggaggaaagccctcgcagagcccgagccaggaggcggccggggaggcagtcctgggcgcaaagacaaaagccacgagtctggttgatgctgtgaacagtgacgctgccaagcccagccagccgggagagggcctcaaaaagcccgtgctcccggccactccaaagccacagtccgccaagccgtcggggacccccatcagcccagcccccgttccctccacgttgccatcagcatcctcggccctggcaggggaccagccgtcttccaccgccttcatccctctcatatcaacccgagtgtctcttcggaaaacccgccagcctccagagcggatcgccagcggcgccatcaccaagggcgtggtcctggacagcaccgaggcgctgtgcctcgccatctctaggaactccgagcagatggccagccacagcgcagtgctggaggccggcaaaaacctctacacgttctgcgtgagctatgtggattccatccagcaaatgaggaacaagtttgccttccgagaggccatcaacaaactggagaataatctccgggagcttcagatctgcccggcgacagcaggcagtggtccagcggccactcaggacttcagcaagctcctcagttcggtgaaggaaatcagtgacatagtgcagaggtag

SEQ ID NO: 272 - DNA, 3450 bp, Homo sapiens
atggggcagcagcctggaaaagtacttggggaccaaagaaggccaagcttgcctgccctgcattttatcaaaggagcagggaagaaggaatcatcgaggcatgggggtccacactgcaatgtttttgtggaacatgaagcccttcagcggccagtagcatctgactttgagcctcagggtctgagtgaagccgctcgttggaactccaaggaaaaccttctcgctggacccagtgaaaatgaccccaaccttttcgttgcactgtatgattttgtggccagtggagataacactctaagcataactaaaggtgaaaagctccgggtcttaggctataatcacaatggggaatggtgtgaagcccaaaccaaaaatggccaaggctgggtcccaagcaactacatcacgccagtcaacagtctggagaaacactcctggtaccatgggcctgtgtcccgcaatgccgctgagtatctgctgagcagcgggatcaatggcagcttcttggtgcgtgagagtgagagcagtcctggccagaggtccatctcgctgagatacgaagggagggtgtaccattacaggatcaacactgcttctgatggcaagctctacgtctcctccgagagccgcttcaacaccctggccgagttggttcatcatcattcaacggtggccgacgggctcatcaccacgctccattatccagccccaaagcgcaacaagcccactgtctatggtgtgtcccccaactacgacaagtgggagatggaacgcacggacatcaccatgaagcacaagctgggcgggggccagtacggggaggtgtacgagggcgtgtggaagaaatacagcctgacggtggccgtgaagaccttgaaggaggacaccatggaggtggaagagttcttgaaagaagctgcagtcatgaaagagatcaaacaccctaacctggtgcagctccttggggtctgcacccgggagcccccgttctatatcatcactgagttcatgacctacgggaacctcctggactacctgagggagtgcaaccggcaggaggtgaacgccgtggtgctgctgtacatggccactcagatctcgtcagccatggagtacctggagaagaaaaacttcatccacagagatcttgctgcccgaaactgcctggtaggggagaaccacttggtgaaggtagctgattttggcctgagcaggttgatgacaggggacacctacacagcccatgctggagccaagttccccatcaaatggactgcacccgagagcctggcctacaacaagttctccatcaagtccgacgtctgggcatttggagtattgctttgggaaattgctacctatggcatgtccccttacccgggaattgacctgtcccaggtgtatgagctgctagagaaggactaccgcatggagcgcccagaaggctgcccagagaaggtctatgaactcatgcgagcatgttggcagtggaatccctctgaccggccctcctttgctgaaatccaccaagcctttgaaacaatgttccaggaatccagtatctcagacgaagtggaaaaggagctggggaaacaaggcgtccgtggggctgtgagtaccttgctgcaggccccagagctgcccaccaagacgaggacctccaggagagctgcagagcacagagacaccactgacgtgcctgagatgcctcactccaagggccagggagagagcgatcctctggaccatgagcctgccgtgtctccattgctccctcgaaaagagcgaggtcccccggagggcggcctgaatgaagatgagcgccttctccccaaagacaaaaagaccaacttgttcagcgccttgatcaagaagaagaagaagacagccccaacccctcccaaacgcagcagctccttccgggagatggacggccagccggagcgcagaggggccggcgaggaagagggccgagacatcagcaacggggcactggctttcacccccttggacacagctgacccagccaagtccccaaagcccagcaatggggctggggtccccaatggagccctccgggagtccgggggctcaggcttccggtctccccacctgtggaagaagtccagcacgctgaccagcagccgcctagccaccggcgaggaggagggcggtggcagctccagcaagcgcttcctgcgctcttgctccgcctcctgcgttccccatggggccaaggacacggagtggaggtcagtcacgctgcctcgggacttgcagtccacgggaagacagtttgactcgtccacatttggagggcacaaaagtgagaagccggctctgcctcggaagagggcaggggagagcaggtctgaccaggtgacccgaggcacagtaacgcctccccccaggctggtgaaaaagaatgaggaagctgctgatgaggtcttcaaagacatcatggagtccagcccgggctccagcccgcccaacctgactccaaaacccctccggcggcaggtcaccgtggcccctgcctcgggcctcccccacaaggaagaagctggaaagggcagtgccttagggacccctgctgcagctgagccagtgacccccaccagcaaagcaggctcaggtgcaccagggggcaccagcaagggccccgccgaggagtccagagtgaggaggcacaagcactcctctgagtcgccagggagggacaaggggaaattgtccaggctcaaacctgccccgccgcccccaccagcagcctctgcagggaaggctggaggaaagccctcgcagagcccgagccaggaggcggccggggaggcagtcctgggcgcaaagacaaaagccacgagtctggttgatgctgtgaacagtgacgctgccaagcccagccagccgggagagggcctcaaaaagcccgtgctcccggccactccaaagccacagtccgccaagccgtcggggacccccatcagcccagcccccgttccctccacgttgccatcagcatcctcggccctggcaggggaccagccgtcttccaccgccttcatccctctcatatcaacccgagtgtctcttcggaaaacccgccagcctccagagcggatcgccagcggcgccatcaccaagggcgtggtcctggacagcaccgaggcgctgtgcctcgccatctctaggaactccgagcagatggccagccacagcgcagtgctggaggccggcaaaaacctctacacgttctgcgtgagctatgtggattccatccagcaaatgaggaacaagtttgccttccgagaggccatcaacaaactggagaataatctccgggagcttcagatctgcccggcgacagcaggcagtggtccagcggccactcaggacttcagcaagctcctcagttcggtgaaggaaatcagtgacatagtgcagaggtag

SEQ ID NO: 273 - DNA, 3449 bp, Homo sapiens
atggggcagcagcctggaaaagtacttggggaccaaagaaggccaagcttgcctgccctgcattttatcaaaggagcagggaagaaggaatcatcgaggcatgggggtccacactgcaatgtttttgtggaacatgaagcccttcagcggccagtagcatctgactttgagcctcagggtctgagtgaagccgctcgttggaactccaaggaaaaccttctcgctggacccagtgaaaatgaccccaaccttttcgttgcactgtatgattttgtggccagtggagataacactctaagcataactaaaggtgaaaagctccgggtcttaggctataatcacaatggggaatggtgtgaagcccaaaccaaaaatggccaaggctgggtcccaagcaactacatcacgccagtcaacagtctggagaaacactcctggtaccatgggcctgtgtcccgcaatgccgctgagtatctgctgagcagcgggatcaatggcagcttcttggtgcgtgagagtgagagcagtcctggccagaggtccatctcgctgagatacgaagggagggtgtaccattacaggatcaacactgcttctgatggcaagctctacgtctcctccgagagccgcttcaacaccctggccgagttggttcatcatcattcaacggtggccgacgggctcatcaccacgctccattatccagccccaaagcgcaacaagcccactgtctatggtgtgtcccccaactacgacaagtgggagatggaacgcacggacatcaccatgaagcacaagctgggcgggggccagtacggggaggtgtacgagggcgtgtggaagaaatacagcctgacggtggccgtgaagaccttgaaggaggacaccatggaggtggaagagttcttgaaagaagctgcagtcatgaaagagatcaaacaccctaacctggtgcagctccttggggtctgcacccgggagcccccgttctatatcatcactgagttcatgacctacgggaacctcctggactacctgagggagtgcaaccggcaggaggtgaacgccgtggtgctgctgtacatggccactcagatctcgtcagccatggagtacctggagaagaaaaacttcatccacagagatcttgctgcccgaaactgcctggtaggggagaaccacttggtgaaggtagctgattttggcctgagcaggttgatgacaggggacacctacacagcccatgctggagccaagttccccatcaaatggactgcacccgagagcctggcctacaacaagttctccatcaagtccgacgtctgggcatttggagtattgctttgggaaattgctacctatggcatgtccccttacccgggaattgacctgtcccaggtgtatgagctgctagagaaggactaccgcatggagcgcccagaaggctgcccagagaaggtctatgaactcatgcgagcatgttggcagtggaatccctctgaccggccctcctttgctgaaatccaccaagcctttgaaacaatgttccaggaatccagtatctcagacgaagtggaaaaggagctggggaaacaaggcgtccgtggggctgtgagtaccttgctgcaggccccagagctgcccaccaagacgaggacctccaggagagctgcagagcacagagacaccactgacgtgcctgagatgcctcactccaagggccagggagagagcgatcctctggaccatgagcctgccgtgtctccattgctccctcgaaaagagcgaggtcccccggagggcggcctgaatgaagatgagcgccttctccccaaagacaaaaagaccaacttgttcagcgccttgatcaagaagaagaagaagacagccccaacccctcccaaacgcagcagctccttccgggagatggacggccagccggagcgcagaggggccggcgaggaagagggccgagacatcagcaacggggcactggctttcacccccttggacacagctgacccagccaagtccccaaagcccagcaatggggctggggtccccaatggagccctccgggagtccgggggctcaggcttccggtctccccacctgtggaagaagtccagcacgctgaccagcagccgcctagccaccggcgaggaggagggcggtggcagctccagcaagcgcttcctgcgctcttgctccgcctcctgcgttccccatggggccaaggacacggagtggaggtcagtcacgctgcctcgggacttgcagtccacgggaagacagtttgactcgtccacatttggagggcacaaaagtgagaagccggctctgcctcggaagagggcaggggagaacaggtctgaccaggtgacccgaggcacagtaacgcctccccccaggctggtgaaaaagaatgaggaagctgctgatgaggtcttcaaagacatcatggagtccagcccgggctccagcccgcccaacctgactccaaaacccctccggcggcaggtcaccgtggcccctgcctcgggcctcccccacaaggaagaagctggaaagggcagtgccttagggacccctgctgcagctgagccagtgacccccaccagcaaagcaggctcaggtgcaccaggggcaccagcaagggccccgccgaggagtccagagtgaggaggcacaagcactcctctgagtcgccagggagggacaaggggaaattgtccaggctcaaacctgccccgccgcccccaccagcagcctctgcagggaaggctggaggaaagccctcgcagagcccgagccaggaggcggccggggaggcagtcctgggcgcaaagacaaaagccacgagtctggttgatgctgtgaacagtgacgctgccaagcccagccagccgggagagggcctcaaaaagcccgtgctcccggccactccaaagccacagtccgccaagccgtcggggacccccatcagcccagcccccgttccctccacgttgccatcagcatcctcggccctggcaggggaccagccgtcttccaccgccttcatccctctcatatcaacccgagtgtctcttcggaaaacccgccagcctccagagcggatcgccagcggcgccatcaccaagggcgtggtcctggacagcaccgaggcgctgtgcctcgccatctctaggaactccgagcagatggccagccacagcgcagtgctggaggccggcaaaaacctctacacgttctgcgtgagctatgtggattccatccagcaaatgaggaacaagtttgccttccgagaggccatcaacaaactggagaataatctccgggagcttcagatctgcccggcgacagcaggcagtggtccagcggccactcaggacttcagcaagctcctcagttcggtgaaggaaatcagtgacatagtgcagaggtag

SEQ ID NO: 274 - DNA, 3117 bp, Homo sapiens
atgcagccagaggagggcacaggctggctgctggagctgctgtccgaggtgcagctgcaacagtacttcctgcggctccgagatgacctcaacgtcacccgcctgtcctactttgagtacgtcaagaatgaggacctggagaagatcggcatgggtcggcctggccagcggcggctgtgggaggctgtgaagaggaggaaggccttgtgcaaacgcaagtcgtggatgagtaaggtgttcagtggaaagcgactggaggctgagttcccacctcatcactctcagagcaccttccggaagacctcgcccgcccctgggggcccagcaggggaggggcccctgcagagcctcacctgcctcattggggagaaggacctgcgcctcctggagaagctgggtgatggttcctttggcgtggtgcgcaggggcgagtgggacgcgccctcagggaagacggtgagtgtggctgtgaagtgcctgaagcccgatgtcctgagccagccagaagccatggacgacttcatccgggaggtcaatgccatgcactcgctcgaccaccgaaacctcatccgcctctacggggtggtgctcacgccgcccatgaagatggtgacagagctggcacctctgggatcgttgttggaccggctacgtaagcaccagggccacttcctcctggggactctgagccgctacgctgtgcaggtggctgagggcatgggctacctggagtccaagcgctttattcaccgtgacctggctgcccgcaatctgctgttggctacccgcgacctggtcaagatcggggactttgggctgatgcgagcactacctcagaatgacgaccattacgtcatgcaggaacatcgcaaggtgcccttcgcctggtgtgcccccgagagcctgaagacacgcaccttctcccatgccagcgacacctggatgttcggggtgacactgtgggaaatgttcacctacggccaggagccctggatcggcctcaacggcagtcagatcctgcataagatcgacaaggagggggagcggctgccccggcccgaggactgtccccaggacatctacaacgtcatggtccagtgctgggctcacaagccagaggacagacccacgtttgtggccctgcgggacttcctgctggaggcccagcccacagacatgcgggcccttcaggactttgaggaaccggacaagctgcacatccagatgaatgatgtcatcaccgtcatcgagggaagggccgagaactactggtggcgtggccagaacacacggacgctgtgtgtggggcccttccctcgcaacgtggtgacctccgtggccggcctgtcggcccaggacatcagccagcccctgcagaacagcttcatccacacagggcatggcgacagtgacccccgccactgctggggcttcccggacaggattgacgaactgtatctgggaaaccccatggacccccccgacctcctgagcgtggaactgagcacctcccggcccccccagcatctaggaggggtgaaaaaaccaacctatgaccctgtgagcgaggaccaagaccccttgtccagcgacttcaagaggctgggcctgcggaagccaggcctgccccgagggctgtggctggcgaagccctcggcgcgggtgccgggcaccaaggccagccgaggcagcggggctgaggtcacgctcatcgacttcggtgaggagcccgtggtcccggccctacggccctgcgcgccctccctggcgcagctggccatggacgcctgctccctgctggacgagaccccgcctcagagccccacgcgggcactgccccggcccctgcaccccacgcctgtggtggactgggacgcacgcccgctgccccccccgcccgcctatgacgacgtggcccaggatgaggatgactttgagatctgctccatcaacagcaccctcgtgggcgcgggggtccctgccgggcccagccagggccagaccaactacgcctttgtgcctgagcaggcgcggccgccccctcccctggaggacaacctgttcctcccgccccagggtgggggcaagccgcccagctccgcacagaccgcagagatcttccaggcgctacagcaggagtgcatgaggcaactgcaggctccggccggctccccggccccctctcccagcccggggggtgacgacaagccccaggtgcctcctcgggtacccatcccccctcggcccacgcgcccacacgtccagctgtctccagcccccccgggcgaggaggagaccagccagtggcctggacctgcttcccctccccgggtgcctccgcgggagcccctgtcccctcaaggctcgaggacacccagccccctggtaccacctggcagctccccgctgccaccccggctctcaagctcacctgggaagaccatgcccaccacccagagctttgcctcagaccccaagtacgccaccccccaggtgatccaggcccctggcccgcgggctggtccctgcatcctgcccatcgtccgggatggcaagaaggtcagcagcacccactattacttgctgcccgagcgaccatcctacctggagcgctaccagcgcttcctgcgtgaggcccagagccccgaggagcctacccccctgcctgtgcctctgctgctgcccccacccagcaccccagcccccgccgcccccacggccaccgtgcggccgatgccccaggctgccttggaccccaaggccaacttctccaccaacaacagcaacccaggggcccggccaccacccccgagggccactgctcggctgccacagaggggctgccctggcgatgggccagaggcgggccggccagcagacaagatccagatggccatggtgcatggggtgaccacagaggagtgccaggcggccctgcagtgccacggctggagcgtgcagagggctgcccagtatctgaaggtggagcagctcttcgggctgggtctgcggcccagaggggagtgccacaaagtgctggagatgttcgactggaacctggagcaggccggctgccaccttctgggctcctggggccctgcccaccacaagcgctga

SEQ ID NO: 275 - DNA, 3117 bp, Homo sapiens
atgcagccagaggagggcacaggctggctgctggagctgctgtccgaggtgcagctgcaacagtacttcctgcggctccgagatgacctcaacgtcacccgcctgtcccactttgagtacgtcaagaatgaggacctggagaagatcggcatgggtcggcctggccagcggcggctgtgggaggctgtgaagaggaggaaggccttgtgcaaacgcaagtcgtggatgagtaaggtgttcagtggaaagcgactggaggctgagttcccacctcatcactctcagagcaccttccggaagacctcgcccgcccctgggggcccagcagggaaggggcccctgcagagcctcacctgcctcattggggagaaggacctgcgcctcctggagaagctgggtgatggttcctttggcgtggtgcgcaggggcgagtgggacgcgccctcagggaagacggtgagtgtggctgtgaagtgcctgaagcccgatgtcctgagccagccagaagccatggacgacttcatccgggaggtcaatgccatgcactcgctcgaccaccgaaacctcatccgcctctacggggtggtgctcacgccgcccatgaagatggtgacagagctggcacctctgggatcgttgttggaccggctacgtaagcaccagggccacttcctcctggggactctgagccgctacgctgtgcaggtggctgagggcatgggctacctggagtccaagcgctttattcaccgtgacctggctgcccgcaatctgctgttggctacccgcgacctggtcaagatcggggactttgggctgatgcgagcactacctcagaatgacgaccattacgtcatgcaggaacatcgcaaggtgcccttcgcctggtgtgcccccgagagcctgaagacacgcaccttctcccatgccagcgacacctggatgttcggggtgacactgtgggaaatgttcacctacggccaggagccctggatcggcctcaacggcagtcagatcctgcataagatcgacaaggagggggagcggctgccccggcccgaggactgtccccaggacatctacaacgtcatggtccagtgctgggctcacaagccagaggacagacccacgtttgtggccctgcgggacttcctgctggaggcccagcccacagacatgcgggcccttcaggactttgaggaaccggacaagctgcacatccagatgaatgatgtcatcaccgtcatcgagggaagggccgagaactactggtggcgtggccagaacacacggacgctgtgtgtggggcccttccctcgcaacgtggtgacctccgtggccggcctgtcggcccaggacatcagccagcccctgcagaacagcttcatccacacagggcatggcgacagtgacccccgccactgctggggcttcccggacaggattgacgaactgtatctgggaaaccccatggacccccccgacctcctgagcgtggaactgagcacctcccggcccccccagcatctaggaggggtgaaaaaaccaacctatgaccctgtgagcgaggaccaagaccccttgtccagcgacttcaagaggctgggcctgcggaagccaggcctgccccgagggctgtggctggcgaagccctcggcgcgggtgccgggcaccaaggccagccgaggcagcggggctgaggtcacgctcatcgacttcggtgaggagcccgtggtcccggccctacggccctgcgcgccctccctggcgcagctggccatggacgcctgctccctgctggacgagaccccgcctcagagccccacgcgggcactgccccggcccctgcaccccacgcctgtggtggactgggacgcacgcccgctgccccccccgcccgcctatgacgacgtggcccaggatgaggatgactttgagatctgctccatcaacagcaccctcgtgggcgcgggggtccctgccgggcccagccagggccagaccaactacgcctttgtgcctgagcaggcgcggccgccccctcccctggaggacaacctgttcctcccgccccagggtgggggcaagccgcccagctccgcacagaccgcagagatcttccaggcgctacagcaggagtgcatgaggcaactgcaggctccggccggctccccggccccctctcccagcccggggggtgacgacaagccccaggtgcctcctcgggtacccatcccccctcggcccacgcgcccacacgtccagctgtctccagcccccccgggcgaggaggagaccagccagtggcctggacctgcttcccctccccgggtgcctccgcgggagcccctgtcccctcaaggctcgaggacacccagccccctggtaccacctggcagctccccgctgccaccccggctctcaagctcacctgggaagaccatgcccaccacccagagctttgcctcagaccccaagtacgccaccccccaggtgatccaggcccctggcccgcgggctggtccctgcatcctgcccatcgtccgggatggcaagaaggtcagcagcacccactattacttgctgcccgagcgaccatcctacctggagcgctaccagcgcttcctgcgtgaggcccagagccccgaggagcctacccccctgcctgtgcctctgctgctgcccccacccagcaccccagcccccgccgcccccacggccaccgtgcggccgatgccccaggctgccttggaccccaaggccaacttctccaccaacaacagcaacccaggggcccggccaccacccccgagggccactgctcggctgccacagaggggctgccctggcgatgggccagaggcgggccggccagcagacaagatccagatggccatggtgcatggggtgaccacagaggagtgccaggcggccctgcagtgccacggctggagcgtgcagagggctgcccagtatctgaaggtggagcagctcttcgggctgggtctgcggcccagaggggagtgccacaaagtgctggagatgttcgactggaacctggagcaggccggctgccaccttctgggctcctggggccctgcccaccacaagcgctga

SEQ ID NO: 276 - DNA, 3117 bp, Homo sapiens
atgcagccagaggagggcacaggctggctgctggagctgctgtccgaggtgcagctgcaacagtacttcctgcggctccgagatgacctcaacgtcacccgcctgtcccactttgagtacgtcaagaatgaggacctggagaagatcggcatgggtcggcctggccagcggcggctgtgggaggctgtgaagaggaggaaggccttgtgcaaacgcaagtcgtggatgagtaaggtgttcagtggaaagcgactggaggctgagttcccacctcatcactctcagagcaccttccggaagacctcgcccgcccctgggggcccagcaggggaggggcccctgcagagcctcacctgcctcattggggagaaggacctgcacctcctggagaagctgggtgatggttcctttggcgtggtgcgcaggggcgagtgggacgcgccctcagggaagacggtgagtgtggctgtgaagtgcctgaagcccgatgtcctgagccagccagaagccatggacgacttcatccgggaggtcaatgccatgcactcgctcgaccaccgaaacctcatccgcctctacggggtggtgctcacgccgcccatgaagatggtgacagagctggcacctctgggatcgttgttggaccggctacgtaagcaccagggccacttcctcctggggactctgagccgctacgctgtgcaggtggctgagggcatgggctacctggagtccaagcgctttattcaccgtgacctggctgcccgcaatctgctgttggctacccgcgacctggtcaagatcggggactttgggctgatgcgagcactacctcagaatgacgaccattacgtcatgcaggaacatcgcaaggtgcccttcgcctggtgtgcccccgagagcctgaagacacgcaccttctcccatgccagcgacacctggatgttcggggtgacactgtgggaaatgttcacctacggccaggagccctggatcggcctcaacggcagtcagatcctgcataagatcgacaaggagggggagcggctgccccggcccgaggactgtccccaggacatctacaacgtcatggtccagtgctgggctcacaagccagaggacagacccacgtttgtggccctgcgggacttcctgctggaggcccagcccacagacatgcgggcccttcaggactttgaggaaccggacaagctgcacatccagatgaatgatgtcatcaccgtcatcgagggaagggccgagaactactggtggcgtggccagaacacacggacgctgtgtgtggggcccttccctcgcaacgtggtgacctccgtggccggcctgtcggcccaggacatcagccagcccctgcagaacagcttcatccacacagggcatggcgacagtgacccccgccactgctggggcttcccggacaggattgacgaactgtatctgggaaaccccatggacccccccgacctcctgagcgtggaactgagcacctcccggcccccccagcatctaggaggggtgaaaaaaccaacctatgaccctgtgagcgaggaccaagaccccttgtccagcgacttcaagaggctgggcctgcggaagccaggcctgccccgagggctgtggctggcgaagccctcggcgcgggtgccgggcaccaaggccagccgaggcagcggggctgaggtcacgctcatcgacttcggtgaggagcccgtggtcccggccctacggccctgcgcgccctccctggcgcagctggccatggacgcctgctccctgctggacgagaccccgcctcagagccccacgcgggcactgccccggcccctgcaccccacgcctgtggtggactgggacgcacgcccgctgccccccccgcccgcctatgacgacgtggcccaggatgaggatgactttgagatctgctccatcaacagcaccctcgtgggcgcgggggtccctgccgggcccagccagggccagaccaactacgcctttgtgcctgagcaggcgcggccgccccctcccctggaggacaacctgttcctcccgccccagggtgggggcaagccgcccagctccgcacagaccgcagagatcttccaggcgctacagcaggagtgcatgaggcaactgcaggctccggccggctccccggccccctctcccagcccggggggtgacgacaagccccaggtgcctcctcgggtacccatcccccctcggcccacgcgcccacacgtccagctgtctccagcccccccgggcgaggaggagaccagccagtggcctggacctgcttcccctccccgggtgcctccgcgggagcccctgtcccctcaaggctcgaggacacccagccccctggtaccacctggcagctccccgctgccaccccggctctcaagctcacctgggaagaccatgcccaccacccagagctttgcctcagaccccaagtacgccaccccccaggtgatccaggcccctggcccgcgggctggtccctgcatcctgcccatcgtccgggatggcaagaaggtcagcagcacccactattacttgctgcccgagcgaccatcctacctggagcgctaccagcgcttcctgcgtgaggcccagagccccgaggagcctacccccctgcctgtgcctctgctgctgcccccacccagcaccccagcccccgccgcccccacggccaccgtgcggccgatgccccaggctgccttggaccccaaggccaacttctccaccaacaacagcaacccaggggcccggccaccacccccgagggccactgctcggctgccacagaggggctgccctggcgatgggccagaggcgggccggccagcagacaagatccagatggccatggtgcatggggtgaccacagaggagtgccaggcggccctgcagtgccacggctggagcgtgcagagggctgcccagtatctgaaggtggagcagctcttcgggctgggtctgcggcccagaggggagtgccacaaagtgctggagatgttcgactggaacctggagcaggccggctgccaccttctgggctcctggggccctgcccaccacaagcgctga

SEQ ID NO: 277 - DNA, 3117 bp, Homo sapiens
atgcagccagaggagggcacaggctggctgctggagctgctgtccgaggtgcagctgcaacagtacttcctgcggctccgagatgacctcaacgtcacccgcctgtcccactttgagtacgtcaagaatgaggacctggagaagatcggcatgggtcggcctggccagcggcggctgtgggaggctgtgaagaggaggaaggccttgtgcaaacgcaagtcgtggatgagtaaggtgttcagtggaaagcgactggaggctgagttcccacctcatcactctcagagcaccttccggaagacctcgcccgcccctgggggcccagcaggggaggggcccctgcagagcctcacctgcctcattggggagaaggacctgcgcctcctggagaagctgggtgatggttcctttggcgtggtgcgcaggggcgagtgggacgcgccctcagggaagacggtgagtgtggctgtgaagtgcctgaagcccgatgtcctgagccagccagaagccatggacgacttcatccgggaggtcaatgccatgcactcgctcgaccaccgaaacctcatccgcctctacggggtggtgctcacgccgcccatgaagatggtgacagagctggcacctctgggatcgttgttggaccggctacgtaagcaccagggccacttcctcctggggactctgagccgctacgctgtgcaggtggctgagggcatgggctacctggagtccaagcgctttattcaccgtgacctggctgcccgcaatctgctgttggctacccgcgacctggtcaagatcggggactttgggctgatgcgagcactacctcagaatgacgaccattacgtcatgcaggaacatcgcaaggtgcccttcgcctggtgtgcccccgagagcctgaagacacgcaccttctcccatgccagcgacacctggatgttcggggtgacactgtgggaaatgttcacctacggccaggagccctggatcggcctcaacggcagtcagatcctgcataagatcgacaaggagggggagcggctgccccggcccgaggactgtccccaggacatctacaacgtcatggtccagtgctgggctcacaagccagaggacagacccacgtttgtggccctgcgggacttcctgctggaggcccagcccacagacacgcgggcccttcaggactttgaggaaccggacaagctgcacatccagatgaatgatgtcatcaccgtcatcgagggaagggccgagaactactggtggcgtggccagaacacacggacgctgtgtgtggggcccttccctcgcaacgtggtgacctccgtggccggcctgtcggcccaggacatcagccagcccctgcagaacagcttcatccacacagggcatggcgacagtgacccccgccactgctggggcttcccggacaggattgacgaactgtatctgggaaaccccatggacccccccgacctcctgagcgtggaactgagcacctcccggcccccccagcatctaggaggggtgaaaaaaccaacctatgaccctgtgagcgaggaccaagaccccttgtccagcgacttcaagaggctgggcctgcggaagccaggcctgccccgagggctgtggctggcgaagccctcggcgcgggtgccgggcaccaaggccagccgaggcagcggggctgaggtcacgctcatcgacttcggtgaggagcccgtggtcccggccctacggccctgcgcgccctccctggcgcagctggccatggacgcctgctccctgctggacgagaccccgcctcagagccccacgcgggcactgccccggcccctgcaccccacgcctgtggtggactgggacgcacgcccgctgccccccccgcccgcctatgacgacgtggcccaggatgaggatgactttgagatctgctccatcaacagcaccctcgtgggcgcgggggtccctgccgggcccagccagggccagaccaactacgcctttgtgcctgagcaggcgcggccgccccctcccctggaggacaacctgttcctcccgccccagggtgggggcaagccgcccagctccgcacagaccgcagagatcttccaggcgctacagcaggagtgcatgaggcaactgcaggctccggccggctccccggccccctctcccagcccggggggtgacgacaagccccaggtgcctcctcgggtacccatcccccctcggcccacgcgcccacacgtccagctgtctccagcccccccgggcgaggaggagaccagccagtggcctggacctgcttcccctccccgggtgcctccgcgggagcccctgtcccctcaaggctcgaggacacccagccccctggtaccacctggcagctccccgctgccaccccggctctcaagctcacctgggaagaccatgcccaccacccagagctttgcctcagaccccaagtacgccaccccccaggtgatccaggcccctggcccgcgggctggtccctgcatcctgcccatcgtccgggatggcaagaaggtcagcagcacccactattacttgctgcccgagcgaccatcctacctggagcgctaccagcgcttcctgcgtgaggcccagagccccgaggagcctacccccctgcctgtgcctctgctgctgcccccacccagcaccccagcccccgccgcccccacggccaccgtgcggccgatgccccaggctgccttggaccccaaggccaacttctccaccaacaacagcaacccaggggcccggccaccacccccgagggccactgctcggctgccacagaggggctgccctggcgatgggccagaggcgggccggccagcagacaagatccagatggccatggtgcatggggtgaccacagaggagtgccaggcggccctgcagtgccacggctggagcgtgcagagggctgcccagtatctgaaggtggagcagctcttcgggctgggtctgcggcccagaggggagtgccacaaagtgctggagatgttcgactggaacctggagcaggccggctgccaccttctgggctcctggggccctgcccaccacaagcgctga

SEQ ID NO: 278 - DNA, 3117 bp, Homo sapiens
atgcagccagaggagggcacaggctggctgctggagctgctgtccgaggtgcagctgcaacagtacttcctgcggctccgagatgacctcaacgtcacccgcctgtcccactttgagtacgtcaagaatgaggacctggagaagatcggcatgggtcggcctggccagcggcggctgtgggaggctgtgaagaggaggaaggccttgtgcaaacgcaagtcgtggatgagtaaggtgttcagtggaaagcgactggaggctgagttcccacctcatcactctcagagcaccttccggaagacctcgcccgcccctgggggcccagcaggggaggggcccctgcagagcctcacctgcctcattggggagaaggacctgcgcctcctggagaagctgggtgatggttcctttggcgtggtgcgcaggggcgagtgggacgcgccctcagggaagacggtgagtgtggctgtgaagtgcctgaagcccgatgtcctgagccagccagaagccatggacgacttcatccgggaggtcaatgccatgcactcgctcgaccaccgaaacctcatccgcctctacggggtggtgctcacgccgcccatgaagatggtgacagagctggcacctctgggatcgttgttggaccggctacgtaagcaccagggccacttcctcctggggactctgagccgctacgctgtgcaggtggctgagggcatgggctacctggagtccaagcgctttattcaccgtgacctggctgcccgcaatctgctgttggctacccgcgacctggtcaagatcggggactttgggctgatgcgagcactacctcagaatgacgaccattacgtcatgcaggaacatcgcaaggtgcccttcgcctggtgtgcccccgagagcctgaagacacgcaccttctcccatgccagcgacacctggatgttcggggtgacactgtgggaaatgttcacctacggccaggagccctggatcggcctcaacggcagtcagatcctgcataagatcgacaaggagggggagcggctgccccggcccgaggactgtccccaggacatctacaacgtcatggtccagtgctgggctcacaagccagaggacagacccacgtttgtggccctgcgggacttcctgctggaggcccagcccacagacatgcgggcccttcaggactttgaggaaccggacaagctgcacatccagatgaatgatgtcatcaccgtcatcgagggaagggccgagaactactggtggcgtggccagaacacacggacgctgtgtgtggggcccttccctcgcaacgtggtgacctccgtggccggcctgtcggcccaggacatcagccagcccctgcagaacagcttcatccacacagggcatggcgacagtgacccccgccactgctggggcttcccggacaggattgacgaactgtatctgggaaaccccatggacccccccgacctcctgagcgtggaactgagcacctcccggcccccccagcatctaggaggggtgaaaaaaccaacctatgaccctgtgagcgaggaccaagaccccttgtccagcgacttcaagaggctgggcctgcggaagccaggcctgccccgagggctgtggctggcgaagccctcggcgcgggtgccgggcaccaaggccagccgaggcagcggggctgaggtcacgctcatcgacttcggtgaggagcccgtggtcccggccctacggccctgcgcgccctccctggcgcagctggccatggacgcctgctccctgctggacgagaccccgcctcagagccccacgcgggcactgccccggcccctgcaccccacgcctgtggtggactgggacgcacgcccgctgccccccccgcccacctatgacgacgtggcccaggatgaggatgactttgagatctgctccatcaacagcaccctcgtgggcgcgggggtccctgccgggcccagccagggccagaccaactacgcctttgtgcctgagcaggcgcggccgccccctcccctggaggacaacctgttcctcccgccccagggtgggggcaagccgcccagctccgcacagaccgcagagatcttccaggcgctacagcaggagtgcatgaggcaactgcaggctccggccggctccccggccccctctcccagcccggggggtgacgacaagccccaggtgcctcctcgggtacccatcccccctcggcccacgcgcccacacgtccagctgtctccagcccccccgggcgaggaggagaccagccagtggcctggacctgcttcccctccccgggtgcctccgcgggagcccctgtcccctcaaggctcgaggacacccagccccctggtaccacctggcagctccccgctgccaccccggctctcaagctcacctgggaagaccatgcccaccacccagagctttgcctcagaccccaagtacgccaccccccaggtgatccaggcccctggcccgcgggctggtccctgcatcctgcccatcgtccgggatggcaagaaggtcagcagcacccactattacttgctgcccgagcgaccatcctacctggagcgctaccagcgcttcctgcgtgaggcccagagccccgaggagcctacccccctgcctgtgcctctgctgctgcccccacccagcaccccagcccccgccgcccccacggccaccgtgcggccgatgccccaggctgccttggaccccaaggccaacttctccaccaacaacagcaacccaggggcccggccaccacccccgagggccactgctcggctgccacagaggggctgccctggcgatgggccagaggcgggccggccagcagacaagatccagatggccatggtgcatggggtgaccacagaggagtgccaggcggccctgcagtgccacggctggagcgtgcagagggctgcccagtatctgaaggtggagcagctcttcgggctgggtctgcggcccagaggggagtgccacaaagtgctggagatgttcgactggaacctggagcaggccggctgccaccttctgggctcctggggccctgcccaccacaagcgctga

SEQ ID NO: 279 - DNA, 3117 bp, Homo sapiens
atgcagccagaggagggcacaggctggctgctggagctgctgtccgaggtgcagctgcaacagtacttcctgcggctccgagatgacctcaacgtcacccgcctgtcccactttgagtacgtcaagaatgaggacctggagaagatcggcatgggtcggcctggccagcggcggctgtgggaggctgtgaagaggaggaaggccttgtgcaaacgcaagtcgtggatgagtaaggtgttcagtggaaagcgactggaggctgagttcccacctcatcactctcagagcaccttccggaagacctcgcccgcccctgggggcccagcaggggaggggcccctgcagagcctcacctgcctcattggggagaaggacctgcgcctcctggagaagctgggtgatggttcctttggcgtggtgcgcaggggcgagtgggacgcgccctcagggaagacggtgagtgtggctgtgaagtgcctgaagcccgatgtcctgagccagccagaagccatggacgacttcatccgggaggtcaatgccatgcactcgctcgaccaccgaaacctcatccgcctctacggggtggtgctcacgccgcccatgaagatggtgacagagctggcacctctgggatcgttgttggaccggctacgtaagcaccagggccacttcctcctggggactctgagccgctacgctgtgcaggtggctgagggcatgggctacctggagtccaagcgctttattcaccgtgacctggctgcccgcaatctgctgttggctacccgcgacctggtcaagatcggggactttgggctgatgcgagcactacctcagaatgacgaccattacgtcatgcaggaacatcgcaaggtgcccttcgcctggtgtgcccccgagagcctgaagacacgcaccttctcccatgccagcgacacctggatgttcggggtgacactgtgggaaatgttcacctacggccaggagccctggatcggcctcaacggcagtcagatcctgcataagatcgacaaggagggggagcggctgccccggcccgaggactgtccccaggacatctacaacgtcatggtccagtgctgggctcacaagccagaggacagacccacgtttgtggccctgcgggacttcctgctggaggcccagcccacagacatgcgggcccttcaggactttgaggaaccggacaagctgcacatccagatgaatgatgtcatcaccgtcatcgagggaagggccgagaactactggtggcgtggccagaacacacggacgctgtgtgtggggcccttccctcgcaacgtggtgacctccgtggccggcctgtcggcccaggacatcagccagcccctgcagaacagcttcatccacacagggcatggcgacagtgacccccgccactgctggggcttcccggacaggattgacgaactgtatctgggaaaccccatggacccccccgacctcctgagcgtggaactgagcacctcccggcccccccagcatctaggaggggtgaaaaaaccaacctatgaccctgtgagcgaggaccaagaccccttgtccagcgacttcaagaggctgggcctgcggaagccaggcctgccccgagggctgtggctggcgaagccctcggcgcgggtgccgggcaccaaggccagccgaggcagcggggctgaggtcacgctcatcgacttcggtgaggagcccgtggtcccggccctacggccctgcgcgccctccctggcgcagctggccatggacgcctgctccctgctggacgagaccccgcctcagagccccacgcgggcactgccccggcccctgcaccccacgcctgtggtggactgggacgcacgcccgctgccccccccgcccgcctatgacgacgtggcccaggatgaggatgactttgagatctgctccatcaacagcaccctcgtgggcgcgggggtccctgccgggcccagccagggccagaccaactacgcctttgtgcctgagcaggcgcggccgccccctcccctggaggacaacctgttcctcccgccccagggtgggggcaagccgcccaactccgcacagaccgcagagatcttccaggcgctacagcaggagtgcatgaggcaactgcaggctccggccggctccccggccccctctcccagcccggggggtgacgacaagccccaggtgcctcctcgggtacccatcccccctcggcccacgcgcccacacgtccagctgtctccagcccccccgggcgaggaggagaccagccagtggcctggacctgcttcccctccccgggtgcctccgcgggagcccctgtcccctcaaggctcgaggacacccagccccctggtaccacctggcagctccccgctgccaccccggctctcaagctcacctgggaagaccatgcccaccacccagagctttgcctcagaccccaagtacgccaccccccaggtgatccaggcccctggcccgcgggctggtccctgcatcctgcccatcgtccgggatggcaagaaggtcagcagcacccactattacttgctgcccgagcgaccatcctacctggagcgctaccagcgcttcctgcgtgaggcccagagccccgaggagcctacccccctgcctgtgcctctgctgctgcccccacccagcaccccagcccccgccgcccccacggccaccgtgcggccgatgccccaggctgccttggaccccaaggccaacttctccaccaacaacagcaacccaggggcccggccaccacccccgagggccactgctcggctgccacagaggggctgccctggcgatgggccagaggcgggccggccagcagacaagatccagatggccatggtgcatggggtgaccacagaggagtgccaggcggccctgcagtgccacggctggagcgtgcagagggctgcccagtatctgaaggtggagcagctcttcgggctgggtctgcggcccagaggggagtgccacaaagtgctggagatgttcgactggaacctggagcaggccggctgccaccttctgggctcctggggccctgcccaccacaagcgctga

SEQ ID NO: 280 - DNA, 3117 bp, Homo sapiens
atgcagccagaggagggcacaggctggctgctggagctgctgtccgaggtgcagctgcaacagtacttcctgcggctccgagatgacctcaacgtcacccgcctgtcccactttgagtacgtcaagaatgaggacctggagaagatcggcatgggtcggcctggccagcggcggctgtgggaggctgtgaagaggaggaaggccttgtgcaaacgcaagtcgtggatgagtaaggtgttcagtggaaagcgactggaggctgagttcccacctcatcactctcagagcaccttccggaagacctcgcccgcccctgggggcccagcaggggaggggcccctgcagagcctcacctgcctcattggggagaaggacctgcgcctcctggagaagctgggtgatggttcctttggcgtggtgcgcaggggcgagtgggacgcgccctcagggaagacggtgagtgtggctgtgaagtgcctgaagcccgatgtcctgagccagccagaagccatggacgacttcatccgggaggtcaatgccatgcactcgctcgaccaccgaaacctcatccgcctctacggggtggtgctcacgccgcccatgaagatggtgacagagctggcacctctgggatcgttgttggaccggctacgtaagcaccagggccacttcctcctggggactctgagccgctacgctgtgcaggtggctgagggcatgggctacctggagtccaagcgctttattcaccgtgacctggctgcccgcaatctgctgttggctacccgcgacctggtcaagatcggggactttgggctgatgcgagcactacctcagaatgacgaccattacgtcatgcaggaacatcgcaaggtgcccttcgcctggtgtgcccccgagagcctgaagacacgcaccttctcccatgccagcgacacctggatgttcggggtgacactgtgggaaatgttcacctacggccaggagccctggatcggcctcaacggcagtcagatcctgcataagatcgacaaggagggggagcggctgccccggcccgaggactgtccccaggacatctacaacgtcatggtccagtgctgggctcacaagccagaggacagacccacgtttgtggccctgcgggacttcctgctggaggcccagcccacagacatgcgggcccttcaggactttgaggaaccggacaagctgcacatccagatgaatgatgtcatcaccgtcatcgagggaagggccgagaactactggtggcgtggccagaacacacggacgctgtgtgtggggcccttccctcgcaacgtggtgacctccgtggccggcctgtcggcccaggacatcagccagcccctgcagaacagcttcatccacacagggcatggcgacagtgacccccgccactgctggggcttcccggacaggattgacgaactgtatctgggaaaccccatggacccccccgacctcctgagcgtggaactgagcacctcccggcccccccagcatctaggaggggtgaaaaaaccaacctatgaccctgtgagcgaggaccaagaccccttgtccagcgacttcaagaggctgggcctgcggaagccaggcctgccccgagggctgtggctggcgaagccctcggcgcgggtgccgggcaccaaggccagccgaggcagcggggctgaggtcacgctcatcgacttcggtgaggagcccgtggtcccggccctacggccctgcgcgccctccctggcgcagctggccatggacgcctgctccctgctggacgagaccccgcctcagagccccacgcgggcactgccccggcccctgcaccccacgcctgtggtggactgggacgcacgcccgctgccccccccgcccgcctatgacgacgtggcccaggatgaggatgactttgagatctgctccatcaacagcaccctcgtgggcgcgggggtccctgccgggcccagccagggccagaccaactacgcctttgtgcctgagcaggcgcggccgccccctcccctggaggacaacctgttcctcccgccccagggtgggggcaagccgcccagctccgcacagaccgcagagatcttccaggcgctacagcaggagtgcatgaggcaactgcaggctccggccggctccccggccccctctcccagcctggggggtgacgacaagccccaggtgcctcctcgggtacccatcccccctcggcccacgcgcccacacgtccagctgtctccagcccccccgggcgaggaggagaccagccagtggcctggacctgcttcccctccccgggtgcctccgcgggagcccctgtcccctcaaggctcgaggacacccagccccctggtaccacctggcagctccccgctgccaccccggctctcaagctcacctgggaagaccatgcccaccacccagagctttgcctcagaccccaagtacgccaccccccaggtgatccaggcccctggcccgcgggctggtccctgcatcctgcccatcgtccgggatggcaagaaggtcagcagcacccactattacttgctgcccgagcgaccatcctacctggagcgctaccagcgcttcctgcgtgaggcccagagccccgaggagcctacccccctgcctgtgcctctgctgctgcccccacccagcaccccagcccccgccgcccccacggccaccgtgcggccgatgccccaggctgccttggaccccaaggccaacttctccaccaacaacagcaacccaggggcccggccaccacccccgagggccactgctcggctgccacagaggggctgccctggcgatgggccagaggcgggccggccagcagacaagatccagatggccatggtgcatggggtgaccacagaggagtgccaggcggccctgcagtgccacggctggagcgtgcagagggctgcccagtatctgaaggtggagcagctcttcgggctgggtctgcggcccagaggggagtgccacaaagtgctggagatgttcgactggaacctggagcaggccggctgccaccttctgggctcctggggccctgcccaccacaagcgctga

SEQ ID NO: 281 - DNA, 3117 bp, Homo sapiens
atgcagccagaggagggcacaggctggctgctggagctgctgtccgaggtgcagctgcaacagtacttcctgcggctccgagatgacctcaacgtcacccgcctgtcccactttgagtacgtcaagaatgaggacctggagaagatcggcatgggtcggcctggccagcggcggctgtgggaggctgtgaagaggaggaaggccttgtgcaaacgcaagtcgtggatgagtaaggtgttcagtggaaagcgactggaggctgagttcccacctcatcactctcagagcaccttccggaagacctcgcccgcccctgggggcccagcaggggaggggcccctgcagagcctcacctgcctcattggggagaaggacctgcgcctcctggagaagctgggtgatggttcctttggcgtggtgcgcaggggcgagtgggacgcgccctcagggaagacggtgagtgtggctgtgaagtgcctgaagcccgatgtcctgagccagccagaagccatggacgacttcatccgggaggtcaatgccatgcactcgctcgaccaccgaaacctcatccgcctctacggggtggtgctcacgccgcccatgaagatggtgacagagctggcacctctgggatcgttgttggaccggctacgtaagcaccagggccacttcctcctggggactctgagccgctacgctgtgcaggtggctgagggcatgggctacctggagtccaagcgctttattcaccgtgacctggctgcccgcaatctgctgttggctacccgcgacctggtcaagatcggggactttgggctgatgcgagcactacctcagaatgacgaccattacgtcatgcaggaacatcgcaaggtgcccttcgcctggtgtgcccccgagagcctgaagacacgcaccttctcccatgccagcgacacctggatgttcggggtgacactgtgggaaatgttcacctacggccaggagccctggatcggcctcaacggcagtcagatcctgcataagatcgacaaggagggggagcggctgccccggcccgaggactgtccccaggacatctacaacgtcatggtccagtgctgggctcacaagccagaggacagacccacgtttgtggccctgcgggacttcctgctggaggcccagcccacagacatgcgggcccttcaggactttgaggaaccggacaagctgcacatccagatgaatgatgtcatcaccgtcatcgagggaagggccgagaactactggtggcgtggccagaacacacggacgctgtgtgtggggcccttccctcgcaacgtggtgacctccgtggccggcctgtcggcccaggacatcagccagcccctgcagaacagcttcatccacacagggcatggcgacagtgacccccgccactgctggggcttcccggacaggattgacgaactgtatctgggaaaccccatggacccccccgacctcctgagcgtggaactgagcacctcccggcccccccagcatctaggaggggtgaaaaaaccaacctatgaccctgtgagcgaggaccaagaccccttgtccagcgacttcaagaggctgggcctgcggaagccaggcctgccccgagggctgtggctggcgaagccctcggcgcgggtgccgggcaccaaggccagccgaggcagcggggctgaggtcacgctcatcgacttcggtgaggagcccgtggtcccggccctacggccctgcgcgccctccctggcgcagctggccatggacgcctgctccctgctggacgagaccccgcctcagagccccacgcgggcactgccccggcccctgcaccccacgcctgtggtggactgggacgcacgcccgctgccccccccgcccgcctatgacgacgtggcccaggatgaggatgactttgagatctgctccatcaacagcaccctcgtgggcgcgggggtccctgccgggcccagccagggccagaccaactacgcctttgtgcctgagcaggcgcggccgccccctcccctggaggacaacctgttcctcccgccccagggtgggggcaagccgcccagctccgcacagaccgcagagatcttccaggcgctacagcaggagtgcatgaggcaactgcaggctccggccggctccccggccccctctcccagcccggggggtgacgacaagccccaggtgcctcctcgggtacccatccccccttggcccacgcgcccacacgtccagctgtctccagcccccccgggcgaggaggagaccagccagtggcctggacctgcttcccctccccgggtgcctccgcgggagcccctgtcccctcaaggctcgaggacacccagccccctggtaccacctggcagctccccgctgccaccccggctctcaagctcacctgggaagaccatgcccaccacccagagctttgcctcagaccccaagtacgccaccccccaggtgatccaggcccctggcccgcgggctggtccctgcatcctgcccatcgtccgggatggcaagaaggtcagcagcacccactattacttgctgcccgagcgaccatcctacctggagcgctaccagcgcttcctgcgtgaggcccagagccccgaggagcctacccccctgcctgtgcctctgctgctgcccccacccagcaccccagcccccgccgcccccacggccaccgtgcggccgatgccccaggctgccttggaccccaaggccaacttctccaccaacaacagcaacccaggggcccggccaccacccccgagggccactgctcggctgccacagaggggctgccctggcgatgggccagaggcgggccggccagcagacaagatccagatggccatggtgcatggggtgaccacagaggagtgccaggcggccctgcagtgccacggctggagcgtgcagagggctgcccagtatctgaaggtggagcagctcttcgggctgggtctgcggcccagaggggagtgccacaaagtgctggagatgttcgactggaacctggagcaggccggctgccaccttctgggctcctggggccctgcccaccacaagcgctga

SEQ ID NO: 282 - DNA, 3117 bp, Homo sapiens
atgcagccagaggagggcacaggctggctgctggagctgctgtccgaggtgcagctgcaacagtacttcctgcggctccgagatgacctcaacgtcacccgcctgtcccactttgagtacgtcaagaatgaggacctggagaagatcggcatgggtcggcctggccagcggcggctgtgggaggctgtgaagaggaggaaggccttgtgcaaacgcaagtcgtggatgagtaaggtgttcagtggaaagcgactggaggctgagttcccacctcatcactctcagagcaccttccggaagacctcgcccgcccctgggggcccagcaggggaggggcccctgcagagcctcacctgcctcattggggagaaggacctgcgcctcctggagaagctgggtgatggttcctttggcgtggtgcgcaggggcgagtgggacgcgccctcagggaagacggtgagtgtggctgtgaagtgcctgaagcccgatgtcctgagccagccagaagccatggacgacttcatccgggaggtcaatgccatgcactcgctcgaccaccgaaacctcatccgcctctacggggtggtgctcacgccgcccatgaagatggtgacagagctggcacctctgggatcgttgttggaccggctacgtaagcaccagggccacttcctcctggggactctgagccgctacgctgtgcaggtggctgagggcatgggctacctggagtccaagcgctttattcaccgtgacctggctgcccgcaatctgctgttggctacccgcgacctggtcaagatcggggactttgggctgatgcgagcactacctcagaatgacgaccattacgtcatgcaggaacatcgcaaggtgcccttcgcctggtgtgcccccgagagcctgaagacacgcaccttctcccatgccagcgacacctggatgttcggggtgacactgtgggaaatgttcacctacggccaggagccctggatcggcctcaacggcagtcagatcctgcataagatcgacaaggagggggagcggctgccccggcccgaggactgtccccaggacatctacaacgtcatggtccagtgctgggctcacaagccagaggacagacccacgtttgtggccctgcgggacttcctgctggaggcccagcccacagacatgcgggcccttcaggactttgaggaaccggacaagctgcacatccagatgaatgatgtcatcaccgtcatcgagggaagggccgagaactactggtggcgtggccagaacacacggacgctgtgtgtggggcccttccctcgcaacgtggtgacctccgtggccggcctgtcggcccaggacatcagccagcccctgcagaacagcttcatccacacagggcatggcgacagtgacccccgccactgctggggcttcccggacaggattgacgaactgtatctgggaaaccccatggacccccccgacctcctgagcgtggaactgagcacctcccggcccccccagcatctaggaggggtgaaaaaaccaacctatgaccctgtgagcgaggaccaagaccccttgtccagcgacttcaagaggctgggcctgcggaagccaggcctgccccgagggctgtggctggcgaagccctcggcgcgggtgccgggcaccaaggccagccgaggcagcggggctgaggtcacgctcatcgacttcggtgaggagcccgtggtcccggccctacggccctgcgcgccctccctggcgcagctggccatggacgcctgctccctgctggacgagaccccgcctcagagccccacgcgggcactgccccggcccctgcaccccacgcctgtggtggactgggacgcacgcccgctgccccccccgcccgcctatgacgacgtggcccaggatgaggatgactttgagatctgctccatcaacagcaccctcgtgggcgcgggggtccctgccgggcccagccagggccagaccaactacgcctttgtgcctgagcaggcgcggccgccccctcccctggaggacaacctgttcctcccgccccagggtgggggcaagccgcccagctccgcacagaccgcagagatcttccaggcgctacagcaggagtgcatgaggcaactgcaggctccggccggctccccggccccctctcccagcccggggggtgacgacaagccccaggtgcctcctcgggtacccatcccccctcggcccacgcgcccacacgtccagctgtctccagcccccccgggcgaggaggagaccagccagtggcctggacctgcttcccctccccgggtgcctccgcgggagcccctgtcccctcaaggctcgaggacacccagccccctggtaccacctggcagctccccgctgccaccccggctctcaagctcacctgggaagaccatgcccaccacccagagctttgcctcagaccccaagtacgccaccccccaggtgatccaggcccctggcccgcgggctggtccctgcatcctgcccatcgtccgggatggcaagaaggtcagcagcacccactattacttgctgcccgagcgaccatcctacctggagcgctaccagcgcttcctgcgtgaggcccagagccccgaggagcctacccccctgcctgtgcctctgctgctgcccccacccagcaccccagcccccgccgcccccacggccaccgtgcggccgatgccccaggctgccttggaccccaaggccaacttctccaccaacaacagcaacccaggggcccggccaccacccccgagggccactgctcggctgccacagagggactgccctggcgatgggccagaggcgggccggccagcagacaagatccagatggccatggtgcatggggtgaccacagaggagtgccaggcggccctgcagtgccacggctggagcgtgcagagggctgcccagtatctgaaggtggagcagctcttcgggctgggtctgcggcccagaggggagtgccacaaagtgctggagatgttcgactggaacctggagcaggccggctgccaccttctgggctcctggggccctgcccaccacaagcgctga

SEQ ID NO: 283 - DNA, 3117 bp, Homo sapiens
atgcagccagaggagggcacaggctggctgctggagctgctgtccgaggtgcagctgcaacagtacttcctgcggctccgagatgacctcaacgtcacccgcctgtcccactttgagtacgtcaagaatgaggacctggagaagatcggcatgggtcggcctggccagcggcggctgtgggaggctgtgaagaggaggaaggccttgtgcaaacgcaagtcgtggatgagtaaggtgttcagtggaaagcgactggaggctgagttcccacctcatcactctcagagcaccttccggaagacctcgcccgcccctgggggcccagcaggggaggggcccctgcagagcctcacctgcctcattggggagaaggacctgcgcctcctggagaagctgggtgatggttcctttggcgtggtgcgcaggggcgagtgggacgcgccctcagggaagacggtgagtgtggctgtgaagtgcctgaagcccgatgtcctgagccagccagaagccatggacgacttcatccgggaggtcaatgccatgcactcgctcgaccaccgaaacctcatccgcctctacggggtggtgctcacgccgcccatgaagatggtgacagagctggcacctctgggatcgttgttggaccggctacgtaagcaccagggccacttcctcctggggactctgagccgctacgctgtgcaggtggctgagggcatgggctacctggagtccaagcgctttattcaccgtgacctggctgcccgcaatctgctgttggctacccgcgacctggtcaagatcggggactttgggctgatgcgagcactacctcagaatgacgaccattacgtcatgcaggaacatcgcaaggtgcccttcgcctggtgtgcccccgagagcctgaagacacgcaccttctcccatgccagcgacacctggatgttcggggtgacactgtgggaaatgttcacctacggccaggagccctggatcggcctcaacggcagtcagatcctgcataagatcgacaaggagggggagcggctgccccggcccgaggactgtccccaggacatctacaacgtcatggtccagtgctgggctcacaagccagaggacagacccacgtttgtggccctgcgggacttcctgctggaggcccagcccacagacatgcgggcccttcaggactttgaggaaccggacaagctgcacatccagatgaatgatgtcatcaccgtcatcgagggaagggccgagaactactggtggcgtggccagaacacacggacgctgtgtgtggggcccttccctcgcaacgtggtgacctccgtggccggcctgtcggcccaggacatcagccagcccctgcagaacagcttcatccacacagggcatggcgacagtgacccccgccactgctggggcttcccggacaggattgacgaactgtatctgggaaaccccatggacccccccgacctcctgagcgtggaactgagcacctcccggcccccccagcatctaggaggggtgaaaaaaccaacctatgaccctgtgagcgaggaccaagaccccttgtccagcgacttcaagaggctgggcctgcggaagccaggcctgccccgagggctgtggctggcgaagccctcggcgcgggtgccgggcaccaaggccagccgaggcagcggggctgaggtcacgctcatcgacttcggtgaggagcccgtggtcccggccctacggccctgcgcgccctccctggcgcagctggccatggacgcctgctccctgctggacgagaccccgcctcagagccccacgcgggcactgccccggcccctgcaccccacgcctgtggtggactgggacgcacgcccgctgccccccccgcccgcctatgacgacgtggcccaggatgaggatgactttgagatctgctccatcaacagcaccctcgtgggcgcgggggtccctgccgggcccagccagggccagaccaactacgcctttgtgcctgagcaggcgcggccgccccctcccctggaggacaacctgttcctcccgccccagggtgggggcaagccgcccagctccgcacagaccgcagagatcttccaggcgctacagcaggagtgcatgaggcaactgcaggctccggccggctccccggccccctctcccagcccggggggtgacgacaagccccaggtgcctcctcgggtacccatcccccctcggcccacgcgcccacacgtccagctgtctccagcccccccgggcgaggaggagaccagccagtggcctggacctgcttcccctccccgggtgcctccgcgggagcccctgtcccctcaaggctcgaggacacccagccccctggtaccacctggcagctccccgctgccaccccggctctcaagctcacctgggaagaccatgcccaccacccagagctttgcctcagaccccaagtacgccaccccccaggtgatccaggcccctggcccgcgggctggtccctgcatcctgcccatcgtccgggatggcaagaaggtcagcagcacccactattacttgctgcccgagcgaccatcctacctggagcgctaccagcgcttcctgcgtgaggcccagagccccgaggagcctacccccctgcctgtgcctctgctgctgcccccacccagcaccccagcccccgccgcccccacggccaccgtgcggccgatgccccaggctgccttggaccccaaggccaacttctccaccaacaacagcaacccaggggcccggccaccacccccgagggccactgctcggctgccacagaggggctgccctggcgatgggccagaggcgggccggccagcagacaagatccagatggccatggtgcatggggtgaccacagaggagtgccaggcggccctgcagtgccacggctggaacgtgcagagggctgcccagtatctgaaggtggagcagctcttcgggctgggtctgcggcccagaggggagtgccacaaagtgctggagatgttcgactggaacctggagcaggccggctgccaccttctgggctcctggggccctgcccaccacaagcgctga

SEQ ID NO: 284 - DNA, 4863 bp, Homo sapiens
atgggagccatcgggctcctgtggctcctgccgctgctgctttccacggcagctgtgggctccgggatggggaccggccagcgcgcgggctccccagctgcggggccgccgctgcagccccgggagccactcagctactcgcgcctgcagaggaagagtctggcagttgacttcgtggtgccctcgctcttccgtgtctacgcccgggacctactgctgccaccatcctcctcggagctgaaggctggcaggcccgaggcccgcggctcgctagctctggactgcgccccgctgctcaggttgctggggccggcgccgggggtctcctggaccgccggttcaccagccccggcagaggcccggacgctgtccagggtgctgaagggcggctccgtgcgcaagctccggcgtgccaagcagttggtgctggagctgggcgaggaggcgatcttggagggttgcgtcgggccccccggggaggcggctgtggggctgctccagttcaatctcagcgagctgttcagttggtggattcgccaaggcgaagggcgactgaggatccgcctgatgcccgagaagaaggcgtcggaagtgggcagagagggaaggctgtccgcggcaattcgcgcctcccagccccgccttctcttccagatcttcgggactggtcatagctccttggaatcaccaacaaacatgccttctccttctcctgattattttacatggaatctcacctggataatgaaagactccttccctttcctgtctcatcgcagccgatatggtctggagtgcagctttgacttcccctgtgagctggagtattcccctccactgcatgacctcaggaaccagagctggtcctggcgccgcatcccctccgaggaggcctcccagatggacttgctggatgggcctggggcagagcgttctaaggagatgcccagaggctcctttctccttctcaacacctcagctgactccaagcacaccatcctgagtccgtggatgaggagcagcagtgagcactgcacactggccgtctcggtgcacaggcacctgcagccctctggaaggtacattgcccagctgctgccccacaacgaggctgcaagagagatcctcctgatgcccactccagggaagcatggttggacagtgctccagggaagaatcgggcgtccagacaacccatttcgagtggccctggaatacatctccagtggaaaccgcagcttgtctgcagtggacttctttgccctgaagaactgcagtgaaggaacatccccaggctccaagatggccctgcagagctccttcacttgttggaatgggacagtcctccagcttgggcaggcctgtgacttccaccaggactgtgcccagggagaagatgagagccagatgtgccggaaactgcctgtgggtttttactgcaactttgaagatggcttctgtggctggacccaaggcacactgtcaccccacactcctcaatggcaggtcaggaccctaaaggatgcccggttccaggaccaccaagaccatgctctattgctcagtaccactgatgtccccgcttctgaaagtgctacagtgaccagtgctacgtttcctgcaccgatcaagagctctccatgtgagctccgaatgtcctggctcattcgtggagtcttgaggggaaacgtgtccttggtgctagtggagaacaaaaccgggaaggagcaaggcaggatggtctggcatgtcgccgcctatgaaggcttgagcctgtggcagtggatggtgttgcctctcctcgatgtgtctgacaggttctggctgcagatggtcgcatggtggggacaaggatccagagccatcgtggcttttgacaatatctccatcagcctggactgctacctcaccattagcggagaggacaagatcctgcagaatacagcacccaaatcaagaaacctgtttgagagaaacccaaacaaggagctgaaacccggggaaaattcaccaagacagacccccatctttgaccctacagttcattggctgttcaccacatgtggggccagcgggccccatggccccacccaggcacagtgcaacaacgcctaccagaactccaacctgagcgtggaggtggggagcgagggccccctgaaaggcatccagatctggaaggtgccagccaccgacacctacagcatctcgggctacggagctgctggcgggaaaggcgggaagaacaccatgatgcggtcccacggcgtgtctgtgctgggcatcttcaacctggagaaggatgacatgctgtacatcctggttgggcagcagggagaggacgcctgccccagtacaaaccagttaatccagaaagtctgcattggagagaacaatgtgatagaagaagaaatccgtgtgaacagaagcgtgcatgagtgggcaggaggcggaggaggagggggtggagccacctacgtatttaagatgaaggatggagtgccggtgcccctgatcattgcagccggaggtggtggcagggcctacggggccaagacagacacgttccacccagagagactggagaataactcctcggttctagggctaaacggcaattccggagccgcaggtggtggaggtggctggaatgataacacttccttgctctgggccggaaaatctttgcaggagggtgccaccggaggacattcctgcccccaggccatgaagaagtgggggtgggagacaagagggggtttcggagggggtggaggggggtgctcctcaggtggaggaggcggaggatatataggcggcaatgcagcctcaaacaatgaccccgaaatggatggggaagatggggtttccttcatcagtccactgggcatcctgtacaccccagctttaaaagtgatggaaggccacggggaagtgaatattaagcattatctaaactgcagtcactgtgaggtagacgaatgtcacatggaccctgaaagccacaaggtcatctgcttctgtgaccacgggacggtgctggctgaggatggcgtctcctgcattgtgtcacccaccccggagccacacctgccactctcgctgatcctctctgtggtgacctctgccctcgtggccgccctggtcctggctttctccggcatcatgattgtgtaccgccggaagcaccaggagctgcaagccatgcagatggagctgcagagccctgagtacaagctgagcaagctccgcacctcgaccatcatgaccgactacaaccccaactactgctttgctggcaagacctcctccatcagtgacctgaaggaggtgccgcggaaaaacatcaccctcattcggggtctgggccatggcgcctttggggaggtgtatgaaggccaggtgtccggaatgcccaacgacccaagccccctgcaagtggctgtgaagacgctgcctgaagtgtgctctgaacaggacgaactggatttcctcatggaagccctgatcatcagcaaattcaaccaccagaacattgttcgctgcattggggtgagcctgcaatccctgccccggttcatcctgctggagctcatggcggggggagacctcaagtccttcctccgagagacccgccctcgcccgagccagccctcctccctggccatgctggaccttctgcacgtggctcgggacattgcctgtggctgtcagtatttggaggaaaaccacttcatccaccgagacattgctgccagaaactgcctcttgacctgtccaggccctggaagagtggccaagattggagacttcgggatggcccgagacatctacagggcgagctactatagaaagggaggctgtgccatgctgccagttaagtggatgcccccagaggccttcatggaaggaatattcacttctaaaacagacacatggtcctttggagtgctgctatgggaaatcttttctcttggatatatgccataccccagcaaaagcaaccaggaagttctggagtttgtcaccagtggaggccggatggacccacccaagaactgccctgggcctgtataccggataatgactcagtgctggcaacatcagcctgaagacaggcccaactttgccatcattttggagaggattgaatactgcacccaggacccggatgtaatcaacaccgctttgccgatagaatatggtccacttgtggaagaggaagagaaagtgcctgtgaggcccaaggaccctgagggggttcctcctctcctggtctctcaacaggcaaaacgggaggaggagcgcagcccagctgccccaccacctctgcctaccacctcctctggcaaggctgcaaagaaacccacagctgcagagatctctgttcgagtccctagagggccggccgtggaagggggacacgtgaatatggcattctctcagtccaaccctccttcggagttgcacaaggtccacggatccagaaacaagcccaccagcttgtggaacccaacgtacggctcctggtttacagagaaacccaccaaaaagaataatcctatagcaaagaaggagccacacgacaggggtaacctggggctggagggaagctgtactgtcccacctaacgttgcaactgggagacttccgggggcctcactgctcctagagccctcttcgctgactgccaatatgaaggaggtacctctgttcaggctacgtcacttcccttgtgtgaatgtcaattacggctaccagcaacagggcttgcccttagaagccgctactgcccctggagctggtcattacgaggataccattctgaaaagcaagaatagcatgaaccagcctgggccctga

SEQ ID NO: 285 - DNA, 3549 bp, Homo sapiens
atggggcagcaggtgggccgcgtcggggaagctccggggctccagcagcctcagccccgcgggatccggggcagcagtgcagccaggccctccggccgcaggcgggacccggcggggcgcaccacagagaccggcttcaatatcttcacccagcatgatcactttgccagctgtgtggaggatggatttgagggagacaagactggaggcagtagtccagaagctttgcatcgtccctatggttgtgatgttgaaccccaggcactaaatgaggctatcaggtggagctccaaggagaacttgctcggagccactgagagtgaccctaatctcttcgttgcactttatgattttgtagcaagtggtgataacacactcagcatcactaaaggtgaaaagctacgagtccttggttacaaccagaatggtgagtggagtgaagttcgctctaagaatgggcagggctgggtgccaagcaactacatcaccccagtgaacagcctggaaaaacactcctggtaccatggacctgtgtcacgcagtgcagctgagtatctgctcagcagtctaatcaatggcagcttcctggtgcgagaaagtgagagtagccctgggcagctgtccatctcgctcaggtacgagggacgtgtgtatcactacaggatcaataccactgcagatggcaaggtgtatgtgactgctgagagccgcttcagcaccttggcagagcttgtacaccatcactccacagtggctgatgggctggtgacaacattacactacccagcacccaagtgtaataagcctacagtctatggtgtgtcccccatccacgacaaatgggaaatggagcgaacagatattaccatgaagcacaaacttgggggcggtcagtatggagaggtttacgttggcgtctggaagaaatacagccttacagttgctgtgaaaacattgaaggaagataccatggaggtagaagaattcctgaaaaaagctgcagtaatgaaggaaatcaagcatcctaatctggtacaacttttaggtgtgtgtactttggagccaccattttacattgtgactgaatacatgccatacgggaatttgctggattacctccgagaatgcaaccgagaagaggtgactgcagttgtgctgctctacatggccactcagatttcttctgcaatggagtacttagagaagaagaatttcatccatagagatcttgcagctcgtaactgcctagtgggagaaaaccatgtggtaaaagtggctgactttggcttaagtagattgatgactggagacacttatactgctcatgctggagccaaatttcctattaagtggacagcaccagagagtcttgcctacaataccttctcaattaaatctgacgtctgggcttttggggtattgttgtgggaaattgctacctatggaatgtcaccatatccaggtattgacctgtctcaggtctatgacctactagaaaaaggatatcgaatggaacagcctgagggatgcccccctaaggtttatgaacttatgagagcatgctggaagtggagccctgccgataggccctcttttgctgaaacacaccaagcttttgaaaccatgttccatgactccagcatttctgaagaggtagctgaggagcttgggagagccgcctcctcgtcatctgttgttccatacctgccccggctacctatacttccttccaagactcggacactgaagaaacaggtggagaacaaggagaacattgaaggggcacaagatgccacagaaaattctgcttccagtttagcaccagggttcatcagaggtgcacaggcctctagtggatccccagcactgcctcgaaagcaaagagacaagtcacccagcagcctcttggaagatgccaaagagacatgcttcaccagggataggaaggggggcttcttcagctccttcatgaagaagagaaatgctcctacaccccccaaacgcagcagctccttccgagaaatggagaatcagccccataagaaatacgaactcacgggtaacttctcatctgttgcttctctacagcatgctgatgggttctctttcactcctgcccagcaagaggcgaatctggtgccacccaagtgctatggggggagctttgcacagaggaacctctgtaatgacgacggtggtgggggtgggggcagtggcactgctgggggtgggtggtctggcatcacaggcttctttacaccacgcttaatcaaaaagacactgggcttacgagcaggtaaacccacagccagtgatgacacttccaagccttttccaaggtcaaactctacatcttccatgtcctcagggcttccagagcaggataggatggcaatgacccttcccaggaactgccagaggtccaaactccagctggaaaggacagtgtccacctcttctcagccagaagagaatgtggacagggccaatgacatgcttccaaaaaaatcagaggaaagtgctgctccaagcagggagagaccaaaagccaagttattgcccagaggagccacagctcttcctctcagaacaccctctggggatctagccattacagagaaggaccctccaggggtgggagtggctggagtggcagctgcccccaagggtaaagagaagaatggtggggcacgacttgggatggctggagttccagaggatggagagcagccgggctggccttctccagccaaggctgcccccgtcctcccaaccactcacaaccacaaagtgccagtccttatctcacccactctgaaacacactccagctgacgtgcagctcattggcacagactctcaggggaataaattcaagctcttatctgagcatcaggtcacatcctctggagacaaggaccgaccccgacgggtaaaaccaaagtgtgccccacccccaccaccagtgatgagactactgcagcatccgtccatctgctcagaccctacagaagagccaactgccctaactgcaggacagtccacatcagaaacacaggaaggaggaaagaaggcagctctgggcgcagtgcccatcagtgggaaagctgggaggccagtgatgcctccacctcaagtgcctctgcccacatcttccatctcgccagccaaaatggccaatggcacagcaggtactaaagtggctctgagaaaaaccaaacaggccgctgagaaaatctcagcagacaaaatcagcaaagaggccctgctggaatgtgctgacctactgtccagtgcactcacggaacctgtgcccaacagccagctggtagacactggacaccagctgcttgactactgctcaggctatgtggactgcatccctcaaactcgcaacaaatttgccttccgagaggctgtgagcaaactggaactcagcctgcaggagctacaggtttcttcagcagctgctggtgtgcccgggacaaaccctgtccttaataacttattgtcatgtgtacaggaaatcagtgatgtggtgcagaggtag

SEQ ID NO: 286 - DNA, 3549 bp, Homo sapiens
atggggcagcaggtgggccgcgtcggggaagctccggggctccagcagcctcagccccgcgggatccggggcagcagtgcagccaggccctccggccgcaggcgggacccggcggggcgcaccacagagaccggcttcaatatcttcacccagcatgatcactttgccagctgtgtggaggatggatttgagggagacaagactggaggcagtagtccagaagctttgcatcgtccctatggttgtgatgttgaaccccaggcactaaatgaggctatcaggtggagctccaaggagaacttgctcggagccactgagagtgaccctaatctcttcgttgcactttatgattttgtagcaagtggtgataacacactcagcatcactaaaggtgaaaagctacgagtccttggttacaaccagaatggtgagtggagtgaagttcgctctaagaatgggcagggctgggtgccaagcaactacatcaccccagtgaacagcctggaaaaacactcctggtaccatggacctgtgtcacgcagtgcagctgagtatctgctcagcagtctaatcaatggcagcttcctggtgcgagaaagtgagagtagccctgggcagctgtccatctcgctcaggtacgagggacgtgtgtatcactacaggatcaataccactgcagatggcaaggtgtatgtgactgctgagagccgcttcagcaccttggcagagcttgtacaccatcactccacagtggctgatgggctggtgacaacattacactacccagcacccaagtgtaataagcctacagtctatggtgtgtcccccatccacgacaaatgggaaatggagcgaacagatattaccatgaagcacaaacttgggggcggtcagtatggagaggtttacgttggcgtctggaagaaatacagccttacagttgctgtgaaaacattgaaggaagataccatggaggtagaagaattcctgaaagaagctgcagtaatgaaggaaatcaagcatcctaatctggcacaacttttaggtgtgtgtactttggagccaccattttacattgtgactgaatacatgccatacgggaatttgctggattacctccgagaatgcaaccgagaagaggtgactgcagttgtgctgctctacatggccactcagatttcttctgcaatggagtacttagagaagaagaatttcatccatagagatcttgcagctcgtaactgcctagtgggagaaaaccatgtggtaaaagtggctgactttggcttaagtagattgatgactggagacacttatactgctcatgctggagccaaatttcctattaagtggacagcaccagagagtcttgcctacaataccttctcaattaaatctgacgtctgggcttttggggtattgttgtgggaaattgctacctatggaatgtcaccatatccaggtattgacctgtctcaggtctatgacctactagaaaaaggatatcgaatggaacagcctgagggatgcccccctaaggtttatgaacttatgagagcatgctggaagtggagccctgccgataggccctcttttgctgaaacacaccaagcttttgaaaccatgttccatgactccagcatttctgaagaggtagctgaggagcttgggagagccgcctcctcgtcatctgttgttccatacctgccccggctacctatacttccttccaagactcggacactgaagaaacaggtggagaacaaggagaacattgaaggggcacaagatgccacagaaaattctgcttccagtttagcaccagggttcatcagaggtgcacaggcctctagtggatccccagcactgcctcgaaagcaaagagacaagtcacccagcagcctcttggaagatgccaaagagacatgcttcaccagggataggaaggggggcttcttcagctccttcatgaagaagagaaatgctcctacaccccccaaacgcagcagctccttccgagaaatggagaatcagccccataagaaatacgaactcacgggtaacttctcatctgttgcttctctacagcatgctgatgggttctctttcactcctgcccagcaagaggcgaatctggtgccacccaagtgctatggggggagctttgcacagaggaacctctgtaatgacgacggtggtgggggtgggggcagtggcactgctgggggtgggtggtctggcatcacaggcttctttacaccacgcttaatcaaaaagacactgggcttacgagcaggtaaacccacagccagtgatgacacttccaagccttttccaaggtcaaactctacatcttccatgtcctcagggcttccagagcaggataggatggcaatgacccttcccaggaactgccagaggtccaaactccagctggaaaggacagtgtccacctcttctcagccagaagagaatgtggacagggccaatgacatgcttccaaaaaaatcagaggaaagtgctgctccaagcagggagagaccaaaagccaagttattgcccagaggagccacagctcttcctctcagaacaccctctggggatctagccattacagagaaggaccctccaggggtgggagtggctggagtggcagctgcccccaagggtaaagagaagaatggtggggcacgacttgggatggctggagttccagaggatggagagcagccgggctggccttctccagccaaggctgcccccgtcctcccaaccactcacaaccacaaagtgccagtccttatctcacccactctgaaacacactccagctgacgtgcagctcattggcacagactctcaggggaataaattcaagctcttatctgagcatcaggtcacatcctctggagacaaggaccgaccccgacgggtaaaaccaaagtgtgccccacccccaccaccagtgatgagactactgcagcatccgtccatctgctcagaccctacagaagagccaactgccctaactgcaggacagtccacatcagaaacacaggaaggaggaaagaaggcagctctgggcgcagtgcccatcagtgggaaagctgggaggccagtgatgcctccacctcaagtgcctctgcccacatcttccatctcgccagccaaaatggccaatggcacagcaggtactaaagtggctctgagaaaaaccaaacaggccgctgagaaaatctcagcagacaaaatcagcaaagaggccctgctggaatgtgctgacctactgtccagtgcactcacggaacctgtgcccaacagccagctggtagacactggacaccagctgcttgactactgctcaggctatgtggactgcatccctcaaactcgcaacaaatttgccttccgagaggctgtgagcaaactggaactcagcctgcaggagctacaggtttcttcagcagctgctggtgtgcccgggacaaaccctgtccttaataacttattgtcatgtgtacaggaaatcagtgatgtggtgcagaggtag

SEQ ID NO: 287 - DNA, 3549 bp, Homo sapiens
atggggcagcaggtgggccgcgtcggggaagctccggggctccagcagcctcagccccgcgggatccggggcagcagtgcagccaggccctccggccgcaggcgggacccggcggggcgcaccacagagaccggcttcaatatcttcacccagcatgatcactttgccagctgtgtggaggatggatttgagggagacaagactggaggcagtagtccagaagctttgcatcgtccctatggttgtgatgttgaaccccaggcactaaatgaggctatcaggtggagctccaaggagaacttgctcggagccactgagagtgaccctaatctcttcgttgcactttatgattttgtagcaagtggtgataacacactcagcatcactaaaggtgaaaagctacgagtccttggttacaaccagaatggtgagtggagtgaagttcgctctaagaatgggcagggctgggtgccaagcaactacatcaccccagtgaacagcctggaaaaacactcctggtaccatggacctgtgtcacgcagtgcagctgagtatctgctcagcagtctaatcaatggcagcttcctggtgcgagaaagtgagagtagccctgggcagctgtccatctcgctcaggtacgagggacgtgtgtatcactacaggatcaataccactgcagatggcaaggtgtatgtgactgctgagagccgcttcagcaccttggcagagcttgtacaccatcactccacagtggctgatgggctggtgacaacattacactacccagcacccaagtgtaataagcctacagtctatggtgtgtcccccatccacgacaaatgggaaatggagcgaacagatattaccatgaagcacaaacttgggggcggtcagtatggagaggtttacgttggcgtctggaagaaatacagccttacagttgctgtgaaaacattgaaggaagataccatggaggtagaagaattcctgaaagaagctgcagtaatgaaggaaatcaagcatcctaatctggtacaacttttaggtgtgtgtactttggagccaccattttacattgtgactgaatacatgccatacgggaatttgctggattacctccgagaatgcaaccgagaagaggtgactgcagttgtgctgctctacatggccactcagatttcttctgcaatggagtacttagagaagaagaatttcatccatagagatcttgcagctcgtaactgcctagtgggagaaaaccatgtggtaaaagtggctgactttggcttaagtagattgatgactggagacacttatactgctcatgctggagccaaatttcctattaggtggacagcaccagagagtcttgcctacaataccttctcaattaaatctgacgtctgggcttttggggtattgttgtgggaaattgctacctatggaatgtcaccatatccaggtattgacctgtctcaggtctatgacctactagaaaaaggatatcgaatggaacagcctgagggatgcccccctaaggtttatgaacttatgagagcatgctggaagtggagccctgccgataggccctcttttgctgaaacacaccaagcttttgaaaccatgttccatgactccagcatttctgaagaggtagctgaggagcttgggagagccgcctcctcgtcatctgttgttccatacctgccccggctacctatacttccttccaagactcggacactgaagaaacaggtggagaacaaggagaacattgaaggggcacaagatgccacagaaaattctgcttccagtttagcaccagggttcatcagaggtgcacaggcctctagtggatccccagcactgcctcgaaagcaaagagacaagtcacccagcagcctcttggaagatgccaaagagacatgcttcaccagggataggaaggggggcttcttcagctccttcatgaagaagagaaatgctcctacaccccccaaacgcagcagctccttccgagaaatggagaatcagccccataagaaatacgaactcacgggtaacttctcatctgttgcttctctacagcatgctgatgggttctctttcactcctgcccagcaagaggcgaatctggtgccacccaagtgctatggggggagctttgcacagaggaacctctgtaatgacgacggtggtgggggtgggggcagtggcactgctgggggtgggtggtctggcatcacaggcttctttacaccacgcttaatcaaaaagacactgggcttacgagcaggtaaacccacagccagtgatgacacttccaagccttttccaaggtcaaactctacatcttccatgtcctcagggcttccagagcaggataggatggcaatgacccttcccaggaactgccagaggtccaaactccagctggaaaggacagtgtccacctcttctcagccagaagagaatgtggacagggccaatgacatgcttccaaaaaaatcagaggaaagtgctgctccaagcagggagagaccaaaagccaagttattgcccagaggagccacagctcttcctctcagaacaccctctggggatctagccattacagagaaggaccctccaggggtgggagtggctggagtggcagctgcccccaagggtaaagagaagaatggtggggcacgacttgggatggctggagttccagaggatggagagcagccgggctggccttctccagccaaggctgcccccgtcctcccaaccactcacaaccacaaagtgccagtccttatctcacccactctgaaacacactccagctgacgtgcagctcattggcacagactctcaggggaataaattcaagctcttatctgagcatcaggtcacatcctctggagacaaggaccgaccccgacgggtaaaaccaaagtgtgccccacccccaccaccagtgatgagactactgcagcatccgtccatctgctcagaccctacagaagagccaactgccctaactgcaggacagtccacatcagaaacacaggaaggaggaaagaaggcagctctgggcgcagtgcccatcagtgggaaagctgggaggccagtgatgcctccacctcaagtgcctctgcccacatcttccatctcgccagccaaaatggccaatggcacagcaggtactaaagtggctctgagaaaaaccaaacaggccgctgagaaaatctcagcagacaaaatcagcaaagaggccctgctggaatgtgctgacctactgtccagtgcactcacggaacctgtgcccaacagccagctggtagacactggacaccagctgcttgactactgctcaggctatgtggactgcatccctcaaactcgcaacaaatttgccttccgagaggctgtgagcaaactggaactcagcctgcaggagctacaggtttcttcagcagctgctggtgtgcccgggacaaaccctgtccttaataacttattgtcatgtgtacaggaaatcagtgatgtggtgcagaggtag

SEQ ID NO: 288 - DNA, 3549 bp, Homo sapiens
atggggcagcaggtgggccgcgtcggggaagctccggggctccagcagcctcagccccgcgggatccggggcagcagtgcagccaggccctccggccgcaggcgggacccggcggggcgcaccacagagaccggcttcaatatcttcacccagcatgatcactttgccagctgtgtggaggatggatttgagggagacaagactggaggcagtagtccagaagctttgcatcgtccctatggttgtgatgttgaaccccaggcactaaatgaggctatcaggtggagctccaaggagaacttgctcggagccactgagagtgaccctaatctcttcgttgcactttatgattttgtagcaagtggtgataacacactcagcatcactaaaggtgaaaagctacgagtccttggttacaaccagaatggtgagtggagtgaagttcgctctaagaatgggcagggctgggtgccaagcaactacatcaccccagtgaacagcctggaaaaacactcctggtaccatggacctgtgtcacgcagtgcagctgagtatctgctcagcagtctaatcaatggcagcttcctggtgcgagaaagtgagagtagccctgggcagctgtccatctcgctcaggtacgagggacgtgtgtatcactacaggatcaataccactgcagatggcaaggtgtatgtgactgctgagagccgcttcagcaccttggcagagcttgtacaccatcactccacagtggctgatgggctggtgacaacattacactacccagcacccaagtgtaataagcctacagtctatggtgtgtcccccatccacgacaaatgggaaatggagcgaacagatattaccatgaagcacaaacttgggggcggtcagtatggagaggtttacgttggcgtctggaagaaatacagccttacagttgctgtgaaaacattgaaggaagataccatggaggtagaagaattcctgaaagaagctgcagtaatgaaggaaatcaagcatcctaatctggtacaacttttaggtgtgtgtactttggagccaccattttacattgtgactgaatacatgccatacgggaatttgctggattacctccgagaatgcaaccgagaagaggtgactgcagttgtgctgctctacatggccactcagatttcttctgcaatggagtacttagagaagaagaatttcatccatagagatcttgcagctcgtaactgcctagtgggagaaaaccatgtggtaaaagtggctgactttggcttaagtagattgatgactggagacacttatactgctcatgctggagccaaatttcctattaagtggacagcaccagagagtcttgcctacaataccttctcaattaaatctgacgtctgggcttttggggtattgttgtgggaaattgctacctatggaatgtcaccatatccaggtattgacctgtctcaggtctatgacctactagaaaaaggatatcgaatggaacagcctgagggatgcccccctaaggtttatgaacttatgagagcatgctggaagtggagccctgccgataggccctcttttgctgaaacacaccaagcttttgaaaccatgttccatgactccagcatttctgaagaggtagctgaggagcttgggagagccgcctcctcgtcatctgttgttccatacctgccccggctacctatacttccttccaagactcggacactgaagaaacaggtggagaacaaggagaacattgaaggggcacaagatgccacagaaaattctgcttccagtttagcaccagggttcatcagaggtgcacaggcctctagtggatccccagcactgcctcgaaagcaaagagacaagtcacccagcagcctcttggaagatgccaaagagacatgcttcaccagggataggaaggggggcttcttcagctccttcataaagaagagaaatgctcctacaccccccaaacgcagcagctccttccgagaaatggagaatcagccccataagaaatacgaactcacgggtaacttctcatctgttgcttctctacagcatgctgatgggttctctttcactcctgcccagcaagaggcgaatctggtgccacccaagtgctatggggggagctttgcacagaggaacctctgtaatgacgacggtggtgggggtgggggcagtggcactgctgggggtgggtggtctggcatcacaggcttctttacaccacgcttaatcaaaaagacactgggcttacgagcaggtaaacccacagccagtgatgacacttccaagccttttccaaggtcaaactctacatcttccatgtcctcagggcttccagagcaggataggatggcaatgacccttcccaggaactgccagaggtccaaactccagctggaaaggacagtgtccacctcttctcagccagaagagaatgtggacagggccaatgacatgcttccaaaaaaatcagaggaaagtgctgctccaagcagggagagaccaaaagccaagttattgcccagaggagccacagctcttcctctcagaacaccctctggggatctagccattacagagaaggaccctccaggggtgggagtggctggagtggcagctgcccccaagggtaaagagaagaatggtggggcacgacttgggatggctggagttccagaggatggagagcagccgggctggccttctccagccaaggctgcccccgtcctcccaaccactcacaaccacaaagtgccagtccttatctcacccactctgaaacacactccagctgacgtgcagctcattggcacagactctcaggggaataaattcaagctcttatctgagcatcaggtcacatcctctggagacaaggaccgaccccgacgggtaaaaccaaagtgtgccccacccccaccaccagtgatgagactactgcagcatccgtccatctgctcagaccctacagaagagccaactgccctaactgcaggacagtccacatcagaaacacaggaaggaggaaagaaggcagctctgggcgcagtgcccatcagtgggaaagctgggaggccagtgatgcctccacctcaagtgcctctgcccacatcttccatctcgccagccaaaatggccaatggcacagcaggtactaaagtggctctgagaaaaaccaaacaggccgctgagaaaatctcagcagacaaaatcagcaaagaggccctgctggaatgtgctgacctactgtccagtgcactcacggaacctgtgcccaacagccagctggtagacactggacaccagctgcttgactactgctcaggctatgtggactgcatccctcaaactcgcaacaaatttgccttccgagaggctgtgagcaaactggaactcagcctgcaggagctacaggtttcttcagcagctgctggtgtgcccgggacaaaccctgtccttaataacttattgtcatgtgtacaggaaatcagtgatgtggtgcagaggtag

SEQ ID NO: 289 - DNA, 3549 bp, Homo sapiens
atggggcagcaggtgggccgcgtcggggaagctccggggctccagcagcctcagccccgcgggatccggggcagcagtgcagccaggccctccggccgcaggcgggacccggcggggcgcaccacagagaccggcttcaatatcttcacccagcatgatcactttgccagctgtgtggaggatggatttgagggagacaagactggaggcagtagtccagaagctttgcatcgtccctatggttgtgatgttgaaccccaggcactaaatgaggctatcaggtggagctccaaggagaacttgctcggagccactgagagtgaccctaatctcttcgttgcactttatgattttgtagcaagtggtgataacacactcagcatcactaaaggtgaaaagctacgagtccttggttacaaccagaatggtgagtggagtgaagttcgctctaagaatgggcagggctgggtgccaagcaactacatcaccccagtgaacagcctggaaaaacactcctggtaccatggacctgtgtcacgcagtgcagctgagtatctgctcagcagtctaatcaatggcagcttcctggtgcgagaaagtgagagtagccctgggcagctgtccatctcgctcaggtacgagggacgtgtgtatcactacaggatcaataccactgcagatggcaaggtgtatgtgactgctgagagccgcttcagcaccttggcagagcttgtacaccatcactccacagtggctgatgggctggtgacaacattacactacccagcacccaagtgtaataagcctacagtctatggtgtgtcccccatccacgacaaatgggaaatggagcgaacagatattaccatgaagcacaaacttgggggcggtcagtatggagaggtttacgttggcgtctggaagaaatacagccttacagttgctgtgaaaacattgaaggaagataccatggaggtagaagaattcctgaaagaagctgcagtaatgaaggaaatcaagcatcctaatctggtacaacttttaggtgtgtgtactttggagccaccattttacattgtgactgaatacatgccatacgggaatttgctggattacctccgagaatgcaaccgagaagaggtgactgcagttgtgctgctctacatggccactcagatttcttctgcaatggagtacttagagaagaagaatttcatccatagagatcttgcagctcgtaactgcctagtgggagaaaaccatgtggtaaaagtggctgactttggcttaagtagattgatgactggagacacttatactgctcatgctggagccaaatttcctattaagtggacagcaccagagagtcttgcctacaataccttctcaattaaatctgacgtctgggcttttggggtattgttgtgggaaattgctacctatggaatgtcaccatatccaggtattgacctgtctcaggtctatgacctactagaaaaaggatatcgaatggaacagcctgagggatgcccccctaaggtttatgaacttatgagagcatgctggaagtggagccctgccgataggccctcttttgctgaaacacaccaagcttttgaaaccatgttccatgactccagcatttctgaagaggtagctgaggagcttgggagagccgcctcctcgtcatctgttgttccatacctgccccggctacctatacttccttccaagactcggacactgaagaaacaggtggagaacaaggagaacattgaaggggcacaagatgccacagaaaattctgcttccagtttagcaccagggttcatcagaggtgcacaggcctctagtggatccccagcactgcctcgaaagcaaagagacaagtcacccagcagcctcttggaagatgccaaagagacatgcttcaccagggataggaaggggggcttcttcagctccttcatgaagaagagaaatgctcctacaacccccaaacgcagcagctccttccgagaaatggagaatcagccccataagaaatacgaactcacgggtaacttctcatctgttgcttctctacagcatgctgatgggttctctttcactcctgcccagcaagaggcgaatctggtgccacccaagtgctatggggggagctttgcacagaggaacctctgtaatgacgacggtggtgggggtgggggcagtggcactgctgggggtgggtggtctggcatcacaggcttctttacaccacgcttaatcaaaaagacactgggcttacgagcaggtaaacccacagccagtgatgacacttccaagccttttccaaggtcaaactctacatcttccatgtcctcagggcttccagagcaggataggatggcaatgacccttcccaggaactgccagaggtccaaactccagctggaaaggacagtgtccacctcttctcagccagaagagaatgtggacagggccaatgacatgcttccaaaaaaatcagaggaaagtgctgctccaagcagggagagaccaaaagccaagttattgcccagaggagccacagctcttcctctcagaacaccctctggggatctagccattacagagaaggaccctccaggggtgggagtggctggagtggcagctgcccccaagggtaaagagaagaatggtggggcacgacttgggatggctggagttccagaggatggagagcagccgggctggccttctccagccaaggctgcccccgtcctcccaaccactcacaaccacaaagtgccagtccttatctcacccactctgaaacacactccagctgacgtgcagctcattggcacagactctcaggggaataaattcaagctcttatctgagcatcaggtcacatcctctggagacaaggaccgaccccgacgggtaaaaccaaagtgtgccccacccccaccaccagtgatgagactactgcagcatccgtccatctgctcagaccctacagaagagccaactgccctaactgcaggacagtccacatcagaaacacaggaaggaggaaagaaggcagctctgggcgcagtgcccatcagtgggaaagctgggaggccagtgatgcctccacctcaagtgcctctgcccacatcttccatctcgccagccaaaatggccaatggcacagcaggtactaaagtggctctgagaaaaaccaaacaggccgctgagaaaatctcagcagacaaaatcagcaaagaggccctgctggaatgtgctgacctactgtccagtgcactcacggaacctgtgcccaacagccagctggtagacactggacaccagctgcttgactactgctcaggctatgtggactgcatccctcaaactcgcaacaaatttgccttccgagaggctgtgagcaaactggaactcagcctgcaggagctacaggtttcttcagcagctgctggtgtgcccgggacaaaccctgtccttaataacttattgtcatgtgtacaggaaatcagtgatgtggtgcagaggtag

SEQ ID NO: 290 - DNA, 3549 bp, Homo sapiens
atggggcagcaggtgggccgcgtcggggaagctccggggctccagcagcctcagccccgcgggatccggggcagcagtgcagccaggccctccggccgcaggcgggacccggcggggcgcaccacagagaccggcttcaatatcttcacccagcatgatcactttgccagctgtgtggaggatggatttgagggagacaagactggaggcagtagtccagaagctttgcatcgtccctatggttgtgatgttgaaccccaggcactaaatgaggctatcaggtggagctccaaggagaacttgctcggagccactgagagtgaccctaatctcttcgttgcactttatgattttgtagcaagtggtgataacacactcagcatcactaaaggtgaaaagctacgagtccttggttacaaccagaatggtgagtggagtgaagttcgctctaagaatgggcagggctgggtgccaagcaactacatcaccccagtgaacagcctggaaaaacactcctggtaccatggacctgtgtcacgcagtgcagctgagtatctgctcagcagtctaatcaatggcagcttcctggtgcgagaaagtgagagtagccctgggcagctgtccatctcgctcaggtacgagggacgtgtgtatcactacaggatcaataccactgcagatggcaaggtgtatgtgactgctgagagccgcttcagcaccttggcagagcttgtacaccatcactccacagtggctgatgggctggtgacaacattacactacccagcacccaagtgtaataagcctacagtctatggtgtgtcccccatccacgacaaatgggaaatggagcgaacagatattaccatgaagcacaaacttgggggcggtcagtatggagaggtttacgttggcgtctggaagaaatacagccttacagttgctgtgaaaacattgaaggaagataccatggaggtagaagaattcctgaaagaagctgcagtaatgaaggaaatcaagcatcctaatctggtacaacttttaggtgtgtgtactttggagccaccattttacattgtgactgaatacatgccatacgggaatttgctggattacctccgagaatgcaaccgagaagaggtgactgcagttgtgctgctctacatggccactcagatttcttctgcaatggagtacttagagaagaagaatttcatccatagagatcttgcagctcgtaactgcctagtgggagaaaaccatgtggtaaaagtggctgactttggcttaagtagattgatgactggagacacttatactgctcatgctggagccaaatttcctattaagtggacagcaccagagagtcttgcctacaataccttctcaattaaatctgacgtctgggcttttggggtattgttgtgggaaattgctacctatggaatgtcaccatatccaggtattgacctgtctcaggtctatgacctactagaaaaaggatatcgaatggaacagcctgagggatgcccccctaaggtttatgaacttatgagagcatgctggaagtggagccctgccgataggccctcttttgctgaaacacaccaagcttttgaaaccatgttccatgactccagcatttctgaagaggtagctgaggagcttgggagagccgcctcctcgtcatctgttgttccatacctgccccggctacctatacttccttccaagactcggacactgaagaaacaggtggagaacaaggagaacattgaaggggcacaagatgccacagaaaattctgcttccagtttagcaccagggttcatcagaggtgcacaggcctctagtggatccccagcactgcctcgaaagcaaagagacaagtcacccagcagcctcttggaagatgccaaagagacatgcttcaccagggataggaaggggggcttcttcagctccttcatgaagaagagaaatgctcctacaccccccaaatgcagcagctccttccgagaaatggagaatcagccccataagaaatacgaactcacgggtaacttctcatctgttgcttctctacagcatgctgatgggttctctttcactcctgcccagcaagaggcgaatctggtgccacccaagtgctatggggggagctttgcacagaggaacctctgtaatgacgacggtggtgggggtgggggcagtggcactgctgggggtgggtggtctggcatcacaggcttctttacaccacgcttaatcaaaaagacactgggcttacgagcaggtaaacccacagccagtgatgacacttccaagccttttccaaggtcaaactctacatcttccatgtcctcagggcttccagagcaggataggatggcaatgacccttcccaggaactgccagaggtccaaactccagctggaaaggacagtgtccacctcttctcagccagaagagaatgtggacagggccaatgacatgcttccaaaaaaatcagaggaaagtgctgctccaagcagggagagaccaaaagccaagttattgcccagaggagccacagctcttcctctcagaacaccctctggggatctagccattacagagaaggaccctccaggggtgggagtggctggagtggcagctgcccccaagggtaaagagaagaatggtggggcacgacttgggatggctggagttccagaggatggagagcagccgggctggccttctccagccaaggctgcccccgtcctcccaaccactcacaaccacaaagtgccagtccttatctcacccactctgaaacacactccagctgacgtgcagctcattggcacagactctcaggggaataaattcaagctcttatctgagcatcaggtcacatcctctggagacaaggaccgaccccgacgggtaaaaccaaagtgtgccccacccccaccaccagtgatgagactactgcagcatccgtccatctgctcagaccctacagaagagccaactgccctaactgcaggacagtccacatcagaaacacaggaaggaggaaagaaggcagctctgggcgcagtgcccatcagtgggaaagctgggaggccagtgatgcctccacctcaagtgcctctgcccacatcttccatctcgccagccaaaatggccaatggcacagcaggtactaaagtggctctgagaaaaaccaaacaggccgctgagaaaatctcagcagacaaaatcagcaaagaggccctgctggaatgtgctgacctactgtccagtgcactcacggaacctgtgcccaacagccagctggtagacactggacaccagctgcttgactactgctcaggctatgtggactgcatccctcaaactcgcaacaaatttgccttccgagaggctgtgagcaaactggaactcagcctgcaggagctacaggtttcttcagcagctgctggtgtgcccgggacaaaccctgtccttaataacttattgtcatgtgtacaggaaatcagtgatgtggtgcagaggtag

SEQ ID NO: 291 - DNA, 3549 bp, Homo sapiens
atggggcagcaggtgggccgcgtcggggaagctccggggctccagcagcctcagccccgcgggatccggggcagcagtgcagccaggccctccggccgcaggcgggacccggcggggcgcaccacagagaccggcttcaatatcttcacccagcatgatcactttgccagctgtgtggaggatggatttgagggagacaagactggaggcagtagtccagaagctttgcatcgtccctatggttgtgatgttgaaccccaggcactaaatgaggctatcaggtggagctccaaggagaacttgctcggagccactgagagtgaccctaatctcttcgttgcactttatgattttgtagcaagtggtgataacacactcagcatcactaaaggtgaaaagctacgagtccttggttacaaccagaatggtgagtggagtgaagttcgctctaagaatgggcagggctgggtgccaagcaactacatcaccccagtgaacagcctggaaaaacactcctggtaccatggacctgtgtcacgcagtgcagctgagtatctgctcagcagtctaatcaatggcagcttcctggtgcgagaaagtgagagtagccctgggcagctgtccatctcgctcaggtacgagggacgtgtgtatcactacaggatcaataccactgcagatggcaaggtgtatgtgactgctgagagccgcttcagcaccttggcagagcttgtacaccatcactccacagtggctgatgggctggtgacaacattacactacccagcacccaagtgtaataagcctacagtctatggtgtgtcccccatccacgacaaatgggaaatggagcgaacagatattaccatgaagcacaaacttgggggcggtcagtatggagaggtttacgttggcgtctggaagaaatacagccttacagttgctgtgaaaacattgaaggaagataccatggaggtagaagaattcctgaaagaagctgcagtaatgaaggaaatcaagcatcctaatctggtacaacttttaggtgtgtgtactttggagccaccattttacattgtgactgaatacatgccatacgggaatttgctggattacctccgagaatgcaaccgagaagaggtgactgcagttgtgctgctctacatggccactcagatttcttctgcaatggagtacttagagaagaagaatttcatccatagagatcttgcagctcgtaactgcctagtgggagaaaaccatgtggtaaaagtggctgactttggcttaagtagattgatgactggagacacttatactgctcatgctggagccaaatttcctattaagtggacagcaccagagagtcttgcctacaataccttctcaattaaatctgacgtctgggcttttggggtattgttgtgggaaattgctacctatggaatgtcaccatatccaggtattgacctgtctcaggtctatgacctactagaaaaaggatatcgaatggaacagcctgagggatgcccccctaaggtttatgaacttatgagagcatgctggaagtggagccctgccgataggccctcttttgctgaaacacaccaagcttttgaaaccatgttccatgactccagcatttctgaagaggtagctgaggagcttgggagagccgcctcctcgtcatctgttgttccatacctgccccggctacctatacttccttccaagactcggacactgaagaaacaggtggagaacaaggagaacattgaaggggcacaagatgccacagaaaattctgcttccagtttagcaccagggttcatcagaggtgcacaggcctctagtggatccccagcactgcctcgaaagcaaagagacaagtcacccagcagcctcttggaagatgccaaagagacatgcttcaccagggataggaaggggggcttcttcagctccttcatgaagaagagaaatgctcctacaccccccaaacgcagcagctccttccgagaaatggagaatcagccccataagaaatacgaactcacgggtaacttctcatctgttgcttctctacaccatgctgatgggttctctttcactcctgcccagcaagaggcgaatctggtgccacccaagtgctatggggggagctttgcacagaggaacctctgtaatgacgacggtggtgggggtgggggcagtggcactgctgggggtgggtggtctggcatcacaggcttctttacaccacgcttaatcaaaaagacactgggcttacgagcaggtaaacccacagccagtgatgacacttccaagccttttccaaggtcaaactctacatcttccatgtcctcagggcttccagagcaggataggatggcaatgacccttcccaggaactgccagaggtccaaactccagctggaaaggacagtgtccacctcttctcagccagaagagaatgtggacagggccaatgacatgcttccaaaaaaatcagaggaaagtgctgctccaagcagggagagaccaaaagccaagttattgcccagaggagccacagctcttcctctcagaacaccctctggggatctagccattacagagaaggaccctccaggggtgggagtggctggagtggcagctgcccccaagggtaaagagaagaatggtggggcacgacttgggatggctggagttccagaggatggagagcagccgggctggccttctccagccaaggctgcccccgtcctcccaaccactcacaaccacaaagtgccagtccttatctcacccactctgaaacacactccagctgacgtgcagctcattggcacagactctcaggggaataaattcaagctcttatctgagcatcaggtcacatcctctggagacaaggaccgaccccgacgggtaaaaccaaagtgtgccccacccccaccaccagtgatgagactactgcagcatccgtccatctgctcagaccctacagaagagccaactgccctaactgcaggacagtccacatcagaaacacaggaaggaggaaagaaggcagctctgggcgcagtgcccatcagtgggaaagctgggaggccagtgatgcctccacctcaagtgcctctgcccacatcttccatctcgccagccaaaatggccaatggcacagcaggtactaaagtggctctgagaaaaaccaaacaggccgctgagaaaatctcagcagacaaaatcagcaaagaggccctgctggaatgtgctgacctactgtccagtgcactcacggaacctgtgcccaacagccagctggtagacactggacaccagctgcttgactactgctcaggctatgtggactgcatccctcaaactcgcaacaaatttgccttccgagaggctgtgagcaaactggaactcagcctgcaggagctacaggtttcttcagcagctgctggtgtgcccgggacaaaccctgtccttaataacttattgtcatgtgtacaggaaatcagtgatgtggtgcagaggtag

SEQ ID NO: 292 - DNA, 3549 bp, Homo sapiens
atggggcagcaggtgggccgcgtcggggaagctccggggctccagcagcctcagccccgcgggatccggggcagcagtgcagccaggccctccggccgcaggcgggacccggcggggcgcaccacagagaccggcttcaatatcttcacccagcatgatcactttgccagctgtgtggaggatggatttgagggagacaagactggaggcagtagtccagaagctttgcatcgtccctatggttgtgatgttgaaccccaggcactaaatgaggctatcaggtggagctccaaggagaacttgctcggagccactgagagtgaccctaatctcttcgttgcactttatgattttgtagcaagtggtgataacacactcagcatcactaaaggtgaaaagctacgagtccttggttacaaccagaatggtgagtggagtgaagttcgctctaagaatgggcagggctgggtgccaagcaactacatcaccccagtgaacagcctggaaaaacactcctggtaccatggacctgtgtcacgcagtgcagctgagtatctgctcagcagtctaatcaatggcagcttcctggtgcgagaaagtgagagtagccctgggcagctgtccatctcgctcaggtacgagggacgtgtgtatcactacaggatcaataccactgcagatggcaaggtgtatgtgactgctgagagccgcttcagcaccttggcagagcttgtacaccatcactccacagtggctgatgggctggtgacaacattacactacccagcacccaagtgtaataagcctacagtctatggtgtgtcccccatccacgacaaatgggaaatggagcgaacagatattaccatgaagcacaaacttgggggcggtcagtatggagaggtttacgttggcgtctggaagaaatacagccttacagttgctgtgaaaacattgaaggaagataccatggaggtagaagaattcctgaaagaagctgcagtaatgaaggaaatcaagcatcctaatctggtacaacttttaggtgtgtgtactttggagccaccattttacattgtgactgaatacatgccatacgggaatttgctggattacctccgagaatgcaaccgagaagaggtgactgcagttgtgctgctctacatggccactcagatttcttctgcaatggagtacttagagaagaagaatttcatccatagagatcttgcagctcgtaactgcctagtgggagaaaaccatgtggtaaaagtggctgactttggcttaagtagattgatgactggagacacttatactgctcatgctggagccaaatttcctattaagtggacagcaccagagagtcttgcctacaataccttctcaattaaatctgacgtctgggcttttggggtattgttgtgggaaattgctacctatggaatgtcaccatatccaggtattgacctgtctcaggtctatgacctactagaaaaaggatatcgaatggaacagcctgagggatgcccccctaaggtttatgaacttatgagagcatgctggaagtggagccctgccgataggccctcttttgctgaaacacaccaagcttttgaaaccatgttccatgactccagcatttctgaagaggtagctgaggagcttgggagagccgcctcctcgtcatctgttgttccatacctgccccggctacctatacttccttccaagactcggacactgaagaaacaggtggagaacaaggagaacattgaaggggcacaagatgccacagaaaattctgcttccagtttagcaccagggttcatcagaggtgcacaggcctctagtggatccccagcactgcctcgaaagcaaagagacaagtcacccagcagcctcttggaagatgccaaagagacatgcttcaccagggataggaaggggggcttcttcagctccttcatgaagaagagaaatgctcctacaccccccaaacgcagcagctccttccgagaaatggagaatcagccccataagaaatacgaactcacgggtaacttctcatctgttgcttctctacagcatgctgatgggttctctttcactcctgcccagcaagaggcgaatctggtgccacccaagtgctatggggggagctttgcacagaggaacctctgtaatgacgacggtggtgggggtgggggcagtggcactgctgggggtgggtggtctggcatcacaggcttctttacaccacgcttaatcaaaaagacactgggcttacgagcaggtaaacccacagccagtgatgacacttccaagccttttccaaggtcaaactctacatcttccatgtcctcagggcttccagagcaggataggatggcaatgacccttcccaggaactgccagaggtccaaactccagctggaaaggacagtgtccacctcttctcagccagaagagaatgtggacagggccaatgacatgcttccaaaaaaatcagaggaaagtgctgctccaagcagggagagaccaaaagccaagttattgcccagaggagccacagctcttcctctcagaacaccctctggggatctagccattacagagaaggaccctccaggggtgggagtggctggagtggcagctgcccccaagggtaaagagaagaatggtggggcacgacttgggatggctggagttccagaggatggagagcagccgggctggccttctccagccaaggctgcccccgtcctcccaaccactcacaaccacagagtgccagtccttatctcacccactctgaaacacactccagctgacgtgcagctcattggcacagactctcaggggaataaattcaagctcttatctgagcatcaggtcacatcctctggagacaaggaccgaccccgacgggtaaaaccaaagtgtgccccacccccaccaccagtgatgagactactgcagcatccgtccatctgctcagaccctacagaagagccaactgccctaactgcaggacagtccacatcagaaacacaggaaggaggaaagaaggcagctctgggcgcagtgcccatcagtgggaaagctgggaggccagtgatgcctccacctcaagtgcctctgcccacatcttccatctcgccagccaaaatggccaatggcacagcaggtactaaagtggctctgagaaaaaccaaacaggccgctgagaaaatctcagcagacaaaatcagcaaagaggccctgctggaatgtgctgacctactgtccagtgcactcacggaacctgtgcccaacagccagctggtagacactggacaccagctgcttgactactgctcaggctatgtggactgcatccctcaaactcgcaacaaatttgccttccgagaggctgtgagcaaactggaactcagcctgcaggagctacaggtttcttcagcagctgctggtgtgcccgggacaaaccctgtccttaataacttattgtcatgtgtacaggaaatcagtgatgtggtgcagaggtag

SEQ ID NO: 293 - DNA, 3549 bp, Homo sapiens
atggggcagcaggtgggccgcgtcggggaagctccggggctccagcagcctcagccccgcgggatccggggcagcagtgcagccaggccctccggccgcaggcgggacccggcggggcgcaccacagagaccggcttcaatatcttcacccagcatgatcactttgccagctgtgtggaggatggatttgagggagacaagactggaggcagtagtccagaagctttgcatcgtccctatggttgtgatgttgaaccccaggcactaaatgaggctatcaggtggagctccaaggagaacttgctcggagccactgagagtgaccctaatctcttcgttgcactttatgattttgtagcaagtggtgataacacactcagcatcactaaaggtgaaaagctacgagtccttggttacaaccagaatggtgagtggagtgaagttcgctctaagaatgggcagggctgggtgccaagcaactacatcaccccagtgaacagcctggaaaaacactcctggtaccatggacctgtgtcacgcagtgcagctgagtatctgctcagcagtctaatcaatggcagcttcctggtgcgagaaagtgagagtagccctgggcagctgtccatctcgctcaggtacgagggacgtgtgtatcactacaggatcaataccactgcagatggcaaggtgtatgtgactgctgagagccgcttcagcaccttggcagagcttgtacaccatcactccacagtggctgatgggctggtgacaacattacactacccagcacccaagtgtaataagcctacagtctatggtgtgtcccccatccacgacaaatgggaaatggagcgaacagatattaccatgaagcacaaacttgggggcggtcagtatggagaggtttacgttggcgtctggaagaaatacagccttacagttgctgtgaaaacattgaaggaagataccatggaggtagaagaattcctgaaagaagctgcagtaatgaaggaaatcaagcatcctaatctggtacaacttttaggtgtgtgtactttggagccaccattttacattgtgactgaatacatgccatacgggaatttgctggattacctccgagaatgcaaccgagaagaggtgactgcagttgtgctgctctacatggccactcagatttcttctgcaatggagtacttagagaagaagaatttcatccatagagatcttgcagctcgtaactgcctagtgggagaaaaccatgtggtaaaagtggctgactttggcttaagtagattgatgactggagacacttatactgctcatgctggagccaaatttcctattaagtggacagcaccagagagtcttgcctacaataccttctcaattaaatctgacgtctgggcttttggggtattgttgtgggaaattgctacctatggaatgtcaccatatccaggtattgacctgtctcaggtctatgacctactagaaaaaggatatcgaatggaacagcctgagggatgcccccctaaggtttatgaacttatgagagcatgctggaagtggagccctgccgataggccctcttttgctgaaacacaccaagcttttgaaaccatgttccatgactccagcatttctgaagaggtagctgaggagcttgggagagccgcctcctcgtcatctgttgttccatacctgccccggctacctatacttccttccaagactcggacactgaagaaacaggtggagaacaaggagaacattgaaggggcacaagatgccacagaaaattctgcttccagtttagcaccagggttcatcagaggtgcacaggcctctagtggatccccagcactgcctcgaaagcaaagagacaagtcacccagcagcctcttggaagatgccaaagagacatgcttcaccagggataggaaggggggcttcttcagctccttcatgaagaagagaaatgctcctacaccccccaaacgcagcagctccttccgagaaatggagaatcagccccataagaaatacgaactcacgggtaacttctcatctgttgcttctctacagcatgctgatgggttctctttcactcctgcccagcaagaggcgaatctggtgccacccaagtgctatggggggagctttgcacagaggaacctctgtaatgacgacggtggtgggggtgggggcagtggcactgctgggggtgggtggtctggcatcacaggcttctttacaccacgcttaatcaaaaagacactgggcttacgagcaggtaaacccacagccagtgatgacacttccaagccttttccaaggtcaaactctacatcttccatgtcctcagggcttccagagcaggataggatggcaatgacccttcccaggaactgccagaggtccaaactccagctggaaaggacagtgtccacctcttctcagccagaagagaatgtggacagggccaatgacatgcttccaaaaaaatcagaggaaagtgctgctccaagcagggagagaccaaaagccaagttattgcccagaggagccacagctcttcctctcagaacaccctctggggatctagccattacagagaaggaccctccaggggtgggagtggctggagtggcagctgcccccaagggtaaagagaagaatggtggggcacgacttgggatggctggagttccagaggatggagagcagccgggctggccttctccagccaaggctgcccccgtcctcccaaccactcacaaccacaaagtgccagtccttatctcacccactctgaaacacactccagctgacgtgcagctcattggcacagactctcaggggaataaattcaagctcttatctgagcatcaggtcacattctctggagacaaggaccgaccccgacgggtaaaaccaaagtgtgccccacccccaccaccagtgatgagactactgcagcatccgtccatctgctcagaccctacagaagagccaactgccctaactgcaggacagtccacatcagaaacacaggaaggaggaaagaaggcagctctgggcgcagtgcccatcagtgggaaagctgggaggccagtgatgcctccacctcaagtgcctctgcccacatcttccatctcgccagccaaaatggccaatggcacagcaggtactaaagtggctctgagaaaaaccaaacaggccgctgagaaaatctcagcagacaaaatcagcaaagaggccctgctggaatgtgctgacctactgtccagtgcactcacggaacctgtgcccaacagccagctggtagacactggacaccagctgcttgactactgctcaggctatgtggactgcatccctcaaactcgcaacaaatttgccttccgagaggctgtgagcaaactggaactcagcctgcaggagctacaggtttcttcagcagctgctggtgtgcccgggacaaaccctgtccttaataacttattgtcatgtgtacaggaaatcagtgatgtggtgcagaggtag

SEQ ID NO: 294 - DNA, 3549 bp, Homo sapiens
atggggcagcaggtgggccgcgtcggggaagctccggggctccagcagcctcagccccgcgggatccggggcagcagtgcagccaggccctccggccgcaggcgggacccggcggggcgcaccacagagaccggcttcaatatcttcacccagcatgatcactttgccagctgtgtggaggatggatttgagggagacaagactggaggcagtagtccagaagctttgcatcgtccctatggttgtgatgttgaaccccaggcactaaatgaggctatcaggtggagctccaaggagaacttgctcggagccactgagagtgaccctaatctcttcgttgcactttatgattttgtagcaagtggtgataacacactcagcatcactaaaggtgaaaagctacgagtccttggttacaaccagaatggtgagtggagtgaagttcgctctaagaatgggcagggctgggtgccaagcaactacatcaccccagtgaacagcctggaaaaacactcctggtaccatggacctgtgtcacgcagtgcagctgagtatctgctcagcagtctaatcaatggcagcttcctggtgcgagaaagtgagagtagccctgggcagctgtccatctcgctcaggtacgagggacgtgtgtatcactacaggatcaataccactgcagatggcaaggtgtatgtgactgctgagagccgcttcagcaccttggcagagcttgtacaccatcactccacagtggctgatgggctggtgacaacattacactacccagcacccaagtgtaataagcctacagtctatggtgtgtcccccatccacgacaaatgggaaatggagcgaacagatattaccatgaagcacaaacttgggggcggtcagtatggagaggtttacgttggcgtctggaagaaatacagccttacagttgctgtgaaaacattgaaggaagataccatggaggtagaagaattcctgaaagaagctgcagtaatgaaggaaatcaagcatcctaatctggtacaacttttaggtgtgtgtactttggagccaccattttacattgtgactgaatacatgccatacgggaatttgctggattacctccgagaatgcaaccgagaagaggtgactgcagttgtgctgctctacatggccactcagatttcttctgcaatggagtacttagagaagaagaatttcatccatagagatcttgcagctcgtaactgcctagtgggagaaaaccatgtggtaaaagtggctgactttggcttaagtagattgatgactggagacacttatactgctcatgctggagccaaatttcctattaagtggacagcaccagagagtcttgcctacaataccttctcaattaaatctgacgtctgggcttttggggtattgttgtgggaaattgctacctatggaatgtcaccatatccaggtattgacctgtctcaggtctatgacctactagaaaaaggatatcgaatggaacagcctgagggatgcccccctaaggtttatgaacttatgagagcatgctggaagtggagccctgccgataggccctcttttgctgaaacacaccaagcttttgaaaccatgttccatgactccagcatttctgaagaggtagctgaggagcttgggagagccgcctcctcgtcatctgttgttccatacctgccccggctacctatacttccttccaagactcggacactgaagaaacaggtggagaacaaggagaacattgaaggggcacaagatgccacagaaaattctgcttccagtttagcaccagggttcatcagaggtgcacaggcctctagtggatccccagcactgcctcgaaagcaaagagacaagtcacccagcagcctcttggaagatgccaaagagacatgcttcaccagggataggaaggggggcttcttcagctccttcatgaagaagagaaatgctcctacaccccccaaacgcagcagctccttccgagaaatggagaatcagccccataagaaatacgaactcacgggtaacttctcatctgttgcttctctacagcatgctgatgggttctctttcactcctgcccagcaagaggcgaatctggtgccacccaagtgctatggggggagctttgcacagaggaacctctgtaatgacgacggtggtgggggtgggggcagtggcactgctgggggtgggtggtctggcatcacaggcttctttacaccacgcttaatcaaaaagacactgggcttacgagcaggtaaacccacagccagtgatgacacttccaagccttttccaaggtcaaactctacatcttccatgtcctcagggcttccagagcaggataggatggcaatgacccttcccaggaactgccagaggtccaaactccagctggaaaggacagtgtccacctcttctcagccagaagagaatgtggacagggccaatgacatgcttccaaaaaaatcagaggaaagtgctgctccaagcagggagagaccaaaagccaagttattgcccagaggagccacagctcttcctctcagaacaccctctggggatctagccattacagagaaggaccctccaggggtgggagtggctggagtggcagctgcccccaagggtaaagagaagaatggtggggcacgacttgggatggctggagttccagaggatggagagcagccgggctggccttctccagccaaggctgcccccgtcctcccaaccactcacaaccacaaagtgccagtccttatctcacccactctgaaacacactccagctgacgtgcagctcattggcacagactctcaggggaataaattcaagctcttatctgagcatcaggtcacatcctctggagacaaggaccgaccccgacgggtaaaaccaaagtgtgccccacccccaccaccagtgatgagactactgcatcatccgtccatctgctcagaccctacagaagagccaactgccctaactgcaggacagtccacatcagaaacacaggaaggaggaaagaaggcagctctgggcgcagtgcccatcagtgggaaagctgggaggccagtgatgcctccacctcaagtgcctctgcccacatcttccatctcgccagccaaaatggccaatggcacagcaggtactaaagtggctctgagaaaaaccaaacaggccgctgagaaaatctcagcagacaaaatcagcaaagaggccctgctggaatgtgctgacctactgtccagtgcactcacggaacctgtgcccaacagccagctggtagacactggacaccagctgcttgactactgctcaggctatgtggactgcatccctcaaactcgcaacaaatttgccttccgagaggctgtgagcaaactggaactcagcctgcaggagctacaggtttcttcagcagctgctggtgtgcccgggacaaaccctgtccttaataacttattgtcatgtgtacaggaaatcagtgatgtggtgcagaggtag

SEQ ID NO: 295 - DNA, 2685 bp, Homo sapiens
atggcgtggcggtgccccaggatgggcagggtcccgctggcctggtgcttggcgctgtgcggctgggcgtgcatggcccccaggggcacgcaggctgaagaaagtcccttcgtgggcaacccagggaatatcacaggtgcccggggactcacgggcacccttcggtgtcagctccaggttcagggagagccccccgaggtacattggcttcgggatggacagatcctggagctcgcggacagcacccagacccaggtgcccctgggtgaggatgaacaggatgactggatagtggtcagccagctcagaatcacctccctgcagctttccgacacgggacagtaccagtgtttggtgtttctgggacatcagaccttcgtgtcccagcctggctatgttgggctggagggcttgccttacttcctggaggagcccgaagacaggactgtggccgccaacacccccttcaacctgagctgccaagctcagggacccccagagcccgtggacctactctggctccaggatgctgtccccctggccacggctccaggtcacggcccccagcgcagcctgcatgttccagggctgaacaagacatcctctttctcctgcgaagcccataacgccaagggggtcaccacatcccgcacagccaccatcacagtgctcccccagcagccccgtaacctccacctggtctcccgccaacccacggagctggaggtggcttggactccaggcctgagcggcatctaccccctgacccactgcaccctgcaggctgtgctgtcagacgatgggatgggcatccaggcgggagaaccagaccccccagaggagcccctcacctcgcaagcatccgtgcccccccatcagcttcggctaggcagcctccatcctcacaccccttatcacatccgcgtggcatgcaccagcagccagggcccctcatcctggacccactggcttcctgtggagacgccggagggagtgcccctgggcccccctgagaacattagtgctacgcggaatgggagccaggccttcgtgcattggcaagagccccgggcgcccctgcagggtaccctgttagggtaccggctggcgtatcaaggccaggacaccccagaggtgctaatggacatagggctaaggcaagaggtgaccctggagctgcagggggacgggtctgtgtccaatctgacagtgtgtgtggcagcctacactgctgctggggatggaccctggagcctcccagtacccctggaggcctggcgcccagggcaagcacagccagtccaccagctggtgaaggaaccttcaactcctgccttctcgtggccctggtggtatgtactgctaggagcagtcgtggccgctgcctgtgtcctcatcttggctctcttccttgtccaccggcgaaagaaggagacccgttatggagaagtgtttgaaccaacagtggaaagaggtgaactggtagtcaggtaccgcgtgcgcaagtcctacagtcgtcggaccactgaagctaccttgaacagcctgggcatcagtgaagagctgaaggagaagctgcgggatgtgatggtggaccggcacaaggtggccctggggaagactctgggagagggagagtttggagctgtgatggaaggccagctcaaccaggacgactccatcctcaaggtggctgtgaagacgataaagattgccatctgcacgaggtcagagctggaggatttcctgagtgaagcggtctgcatgaaggaatttgaccatcccaacgtcatgaggctcatcggtgtctgtttccagggttctgaacgagagagcttcccagcacctgtggtcatcttacctttcatgaaacatggagacctacacagcttcctcctctattcccggctcggggaccagccagtgtacctgcccactcagatgctagtgaagttcatggcagacatcgccagtggcatggagtatctgagtaccaagagattcatacaccgggacctggcggccaggaactgcatgctgaatgagaacatgtccgtgtgtgtggcggacttcgggctctccaagaagatctacaatggggactactaccgccagggacgtatcgccaagatgccagtcaagtggattgccattgagagtctagctgaccgtgtctacaccagcaagagcgatgtgtggtccttcggggtgacaatgtgggagattgccacaagaggccaaaccccatatccgggcgtggagaacagcgagatttatgactatctgcgccagggaaatcgcctgaagcagcctgcggactgtctggatggactgtatgccttgatgtcgcggtgctgggagctaaatccccaggaccggccaagttttacagagctgcgggaagatttggagaacacactgaaggccttgcctcctgcccaggagcctgacgaaatcctctatgtcaacatggatgagggtggaggttatcctgaaccccctggagctgcaggaggagctgaccccccaacccagccagaccctaaggattcctgtagctgcctcactgcggctgaggtccatcctgctggacgctatgtcctctgcccttccacaacccctagccccgctcagcctgctgataggggctccccagcagccccagggcaggaggatggtgcctga

SEQ ID NO: 296 - DNA, 2685 bp, Homo sapiens
atggcgtggcggtgccccaggatgggcagggtcccgctggcctggtgcttggcgctgtgcggctgggcgtgcatggcccccaggggcacgcaggctgaagaaagtcccttcgtgggcaacccagggaatatcacaggtgcccggggactcacgggcacccttcggtgtcagctccaggttcagggagagccccccgaggtacattggcttcgggatggacagatcctggagctcgcggacagcacccagacccaggtgcccctgggtgaggatgaacaggatgactggatagtggtcagccagctcagaatcacctccctgcagctttccgacacgggacagtaccagtgtttggtgtttctgggacatcagaccttcgtgtcccagcctggctatgttgggctggagggcttgccttacttcctggaggagcccgaagacaggactgtggccgccaacacccccttcaacctgagctgccaagctcagggacccccagagcccgtggacctactctggctccaggatgctgtccccctggccacggctccaggtcacggcccccagcgcagcctgcatgttccagggctgaacaagacatcctctttctcctgcgaagcccataacgccaagggggtcaccacatcccgcacagccaccatcacagtgctcccccagcagccccgtaacctccacctggtctcccgccaacccacggagctggaggtggcttggactccaggcctgagcggcatctaccccctgacccactgcaccctgcaggctgtgctgtcagacgatgggatgggcatccaggcgggagaaccagaccccccagaggagcccctcacctcgcaagcatccgtgcccccccatcagcttcggctaggcagcctccatcctcacaccccttatcacatccgcgtggcatgcaccagcagccagggcccctcatcctggacccactggcttcctgtggagacgccggagggagtgcccctgggcccccctgagaacattagtgctacgcggaatgggagccaggccttcgtgcattggcaagagccccgggcgcccctgcagggtaccctgttagggtaccggctggcgtatcaaggccaggacaccccagaggtgctaatggacatagggctaaggcaagaggtgaccctggagctgcagggggacgggtctgtgtccaatctgacagtgtgtgtggcagcctacactgctgctggggatggaccctggagcctcccagtacccctggaggcctggcgcccagggcaagcacagccagtccaccagctggtgaaggaaccttcaactcctgccttctcgtggccctggtggtatgtactgctaggagcagtcgtggccgctgcctgtgtcctcatcttggctctcttccttgtccaccggcgaaagaaggagacccgttatggagaagtgtttgaaccaacagtggaaagaggtgaactggtagtcaggtaccgcgtgcgcaagtcctacagtcgtcggaccactgaagctaccttgaacagcctgggcatcagtgaagagctgaaggagaagctgcgggatgtgatggtggaccggcacaaggtggccctggggaagactctgggagagggagagtttggagctgtgatggaaggccagctcaaccaggacgactccatcctcaaggtggctgtgaagacgatgaagattgccatctgcacgaggtcagagctggaggatttcctgagtgaagcggtctgcaagaaggaatttgaccatcccaacgtcatgaggctcatcggtgtctgtttccagggttctgaacgagagagcttcccagcacctgtggtcatcttacctttcatgaaacatggagacctacacagcttcctcctctattcccggctcggggaccagccagtgtacctgcccactcagatgctagtgaagttcatggcagacatcgccagtggcatggagtatctgagtaccaagagattcatacaccgggacctggcggccaggaactgcatgctgaatgagaacatgtccgtgtgtgtggcggacttcgggctctccaagaagatctacaatggggactactaccgccagggacgtatcgccaagatgccagtcaagtggattgccattgagagtctagctgaccgtgtctacaccagcaagagcgatgtgtggtccttcggggtgacaatgtgggagattgccacaagaggccaaaccccatatccgggcgtggagaacagcgagatttatgactatctgcgccagggaaatcgcctgaagcagcctgcggactgtctggatggactgtatgccttgatgtcgcggtgctgggagctaaatccccaggaccggccaagttttacagagctgcgggaagatttggagaacacactgaaggccttgcctcctgcccaggagcctgacgaaatcctctatgtcaacatggatgagggtggaggttatcctgaaccccctggagctgcaggaggagctgaccccccaacccagccagaccctaaggattcctgtagctgcctcactgcggctgaggtccatcctgctggacgctatgtcctctgcccttccacaacccctagccccgctcagcctgctgataggggctccccagcagccccagggcaggaggatggtgcctga

SEQ ID NO: 297 - DNA, 2685 bp, Homo sapiens
atggcgtggcggtgccccaggatgggcagggtcccgctggcctggtgcttggcgctgtgcggctgggcgtgcatggcccccaggggcacgcaggctgaagaaagtcccttcgtgggcaacccagggaatatcacaggtgcccggggactcacgggcacccttcggtgtcagctccaggttcagggagagccccccgaggtacattggcttcgggatggacagatcctggagctcgcggacagcacccagacccaggtgcccctgggtgaggatgaacaggatgactggatagtggtcagccagctcagaatcacctccctgcagctttccgacacgggacagtaccagtgtttggtgtttctgggacatcagaccttcgtgtcccagcctggctatgttgggctggagggcttgccttacttcctggaggagcccgaagacaggactgtggccgccaacacccccttcaacctgagctgccaagctcagggacccccagagcccgtggacctactctggctccaggatgctgtccccctggccacggctccaggtcacggcccccagcgcagcctgcatgttccagggctgaacaagacatcctctttctcctgcgaagcccataacgccaagggggtcaccacatcccgcacagccaccatcacagtgctcccccagcagccccgtaacctccacctggtctcccgccaacccacggagctggaggtggcttggactccaggcctgagcggcatctaccccctgacccactgcaccctgcaggctgtgctgtcagacgatgggatgggcatccaggcgggagaaccagaccccccagaggagcccctcacctcgcaagcatccgtgcccccccatcagcttcggctaggcagcctccatcctcacaccccttatcacatccgcgtggcatgcaccagcagccagggcccctcatcctggacccactggcttcctgtggagacgccggagggagtgcccctgggcccccctgagaacattagtgctacgcggaatgggagccaggccttcgtgcattggcaagagccccgggcgcccctgcagggtaccctgttagggtaccggctggcgtatcaaggccaggacaccccagaggtgctaatggacatagggctaaggcaagaggtgaccctggagctgcagggggacgggtctgtgtccaatctgacagtgtgtgtggcagcctacactgctgctggggatggaccctggagcctcccagtacccctggaggcctggcgcccagggcaagcacagccagtccaccagctggtgaaggaaccttcaactcctgccttctcgtggccctggtggtatgtactgctaggagcagtcgtggccgctgcctgtgtcctcatcttggctctcttccttgtccaccggcgaaagaaggagacccgttatggagaagtgtttgaaccaacagtggaaagaggtgaactggtagtcaggtaccgcgtgcgcaagtcctacagtcgtcggaccactgaagctaccttgaacagcctgggcatcagtgaagagctgaaggagaagctgcgggatgtgatggtggaccggcacaaggtggccctggggaagactctgggagagggagagtttggagctgtgatggaaggccagctcaaccaggacgactccatcctcaaggtggctgtgaagacgatgaagattgccatctgcacgaggtcagagctggaggatttcctgagtgaagcggtctgcatgaaggaatttgaccatcccaacgtcatgaggctcatcggtgtctgtttccagggttctgaacgagagagcttcccagcacctgtggtcatcttacctttcatgaaacatggagacctacacagcttcctcctctattcccggctcggggaccagccagtgtacctgcccactcagatgctagtgaagttcatggcagacatcgccagtggcatggagtatctgagtaccaagagattcatacaccgggacctggcggccaggaactgcatgctgaatgagaacatgtccgtgtgtgtggcggacttcgggctctccaagaagatctacaatggggactactaccgccagggacgtatcgccaagatgccagtcaagtggattgccattgagagtctagctgaccgtgtctacaccagcaagagcgatgtgtggtccttcggggtgacaatgtgggagattgccacaagaggccaaaccccatatccgggcgtggagaacagcgagatttatgactatctgcgccagggaaatcgcctgaagcagcctgcggactgtctggatggactgtatgccttgatgtcgcggtgctgggagctaaatccccaggaccggccaagttttacagagctgcgggaagatttggagaacacactgaaggccttgcctcctgcccaggagcctgacgaaatcctctatgtcaacatggatgagggtggaggttatcctgaaccccctgtagctgcaggaggagctgaccccccaacccagccagaccctaaggattcctgtagctgcctcactgcggctgaggtccatcctgctggacgctatgtcctctgcccttccacaacccctagccccgctcagcctgctgataggggctccccagcagccccagggcaggaggatggtgcctga

SEQ ID NO: 298 - DNA, 2028 bp, Homo sapiens
atggatacaaaatctattctagaagaacttcttctcaaaagatcacagcaaaagaagaaaatgtcaccaaataattacaaagaacggctttttgttttgaccaaaacaaacctttcctactatgaatatgacaaaatgaaaaggggcagcagaaaaggatccattgaaattaagaaaatcagatgtgtggagaaagtaaatctcgaggagcagacgcctgtagagagacagtacccatttcagattgtctataaagatgggcttctctatgtctatgcatcaaatgaagagagccgaagtcagtggttgaaagcattacaaaaagagataaggggtaacccccacctgctggtcaagtaccatagtgggttcttcgtggacgggaagttcctgtgttgccagcagagctgtaaagcagccccaggatgtaccctctgggaagcatatgataatctgcatactgcagtcaatgaagagaaacacagagttcccaccttcccagacagagtgctgaagatacctcgggcagttcctgttctcaaaatggatgcaccatcttcaagtaccactctagcccaatatgacaacgaatcaaagaaaaactatggctcccagccaccatcttcaagtaccagtctagcgcaatatgacagcaactcaaagaaaatctatggctcccagccaaacttcaacatgcagtatattccaagggaagacttccctgactggtggcaagtaagaaaactgaaaagtagcagcagcagtgaagatgttgcaagcagtaaccaaaaagaaagaaatgtgaatcacaccacctcaaagatttcatgggaattccctgagtcaagttcatctgaagaagaggaaaacctggatgattatgactggtttgctggtaacatctccagatcacaatctgaacagttactcagacaaaagggaaaagaaggagcatttatggttagaaattcgagccaagtgggaatgtacacagtgtccttatttagtaaggctgtgaatgataaaaaaggaactgtcaaacattaccacgtgcatacaaatgctgagaacaaattatacctggcagaaaactactgttttgattccattccaaagcttattcattatcatcaacacaattcagcaggcatgatcacacggctccgccaccctgtgtcaacaaaggccaacaaggtccccgactctgtgtccctgggaaatggaatctgggaactgaaaagagaagagattaccttgttgaaggagctgggaagtggccagtttggagtggtccagctgggcaagtggaaggggcagtatgatgttgctgttaagatgatcaaggagggctccatgtcagaagatgaattctttcaggaggcccagactatgatgaaactcagccatcccaagctggttaaattctatggagtgtgttcaaaggaataccccatatacatagtgactgaatatataagcaatggctgcttgctgaattacctgaggagtcacggaaaaggacttgaaccttcccagctcttagaaatgtgctacgatgtctgtgaaggcatggccttcttggagagtcaccaattcatacaccgggacttggctgctcgtaactgcttggtggacagagatctctgtgtgaaagtatctgactttggaatgacaaggtatgttcttgatgaccagtatgtcagttcagtcggaacaaagtttccagtcaagtggtcagctccagaggtgtttcattacttcaaatacagcagcaagtcagacgtatgggcatttgggatcctgatgtgggaggtgttcagcctggggaagcagccctatgacttgtatgacaactcccaggtggttctgaaggtctcccagggccacaggctttaccggccccacctggcatcggacaccatctaccagatcatgtacagctgctggcacgagcttccagaaaagcgtcccacatttcagcaactcctgtcttccattgaaccacttcgggaaaaagacaagcattga

SEQ ID NO: 299 - DNA, 2025 bp, Homo sapiens
atggatacaaaatctattctagaagaacttcttctcaaaagatcacagcaaaagaagaaaatgtcaccaaataattacaaagaacggctttttgttttgaccaaaacaaacctttcctactatgaatatgacaaaatgaaaaggggcagcagaaaaggatccattgaaattaagaaaatcagatgtgtggagaaagtaaatctcgaggagcagacgcctgtagagagacagtacccatttcagattgtctataaagatgggcttctctatgtctatgcatcaaatgaagagagccgaagtcagtggttgaaagcattacaaaaagagataaggggtaacccccacctgctggtcaagtaccatagtgggttcttcgtggacgggaagttcctgtgttgccagcagagctgtaaagcagccccaggatgtaccctctgggaagcatatgctaatctgcatactgcagtcaatgaagagaaacacagagttcccaccttcccagacagagtgctgaagatacctcgggcagttcctgttctcaaaatggatgcaccatcttcaagtaccactctagcccaatatgacaacgaatcaaagaaaaactatggctcccagccaccatcttcaagtaccagtctagcgcaatatgacagcaactcaaagaaaatctatggctcccagccaaacttcaacatgcagtatattccaagggaagacttccctgactggtggcaagtaagaaaactgaaaagtagcagcagtgaagatgttgcaagcagtaaccaaaaagaaagaaatgtgaatcacaccacctcaaagatttcatgggaattccctgagtcaagttcatctgaagaagaggaaaacctggatgattatgactggtttgctggtaacatctccagatcacaatctgaacagttactcagacaaaagggaaaagaaggagcatttatggttagaaattcgagccaagtgggaatgtacacagtgtccttatttagtaaggctgtgaatgataaaaaaggaactgtcaaacattaccacgtgcatacaaatgctgagaacaaattatacctggcagaaaactactgttttgattccattccaaagcttattcattatcatcaacacaattcagcaggcatgatcacacggctccgccaccctgtgtcaacaaaggccaacaaggtccccgactctgtgtccctgggaaatggaatctgggaactgaaaagagaagagattaccttgttgaaggagctgggaagtggccagtttggagtggtccagctgggcaagtggaaggggcagtatgatgttgctgttaagatgatcaaggagggctccatgtcagaagatgaattctttcaggaggcccagactatgatgaaactcagccatcccaagctggttaaattctatggagtgtgttcaaaggaataccccatatacatagtgactgaatatataagcaatggctgcttgctgaattacctgaggagtcacggaaaaggacttgaaccttcccagctcttagaaatgtgctacgatgtctgtgaaggcatggccttcttggagagtcaccaattcatacaccgggacttggctgctcgtaactgcttggtggacagagatctctgtgtgaaagtatctgactttggaatgacaaggtatgttcttgatgaccagtatgtcagttcagtcggaacaaagtttccagtcaagtggtcagctccagaggtgtttcattacttcaaatacagcagcaagtcagacgtatgggcatttgggatcctgatgtgggaggtgttcagcctggggaagcagccctatgacttgtatgacaactcccaggtggttctgaaggtctcccagggccacaggctttaccggccccacctggcatcggacaccatctaccagatcatgtacagctgctggcacgagcttccagaaaagcgtcccacatttcagcaactcctgtcttccattgaaccacttcgggaaaaagacaagcattga

SEQ ID NO: 300 - DNA, 2028 bp, Homo sapiens
atggatacaaaatctattctagaagaacttcttctcaaaagatcacagcaaaagaagaaaatgtcaccaaataattacaaagaacggctttttgttttgaccaaaacaaacctttcctactatgaatatgacaaaatgaaaaggggcagcagaaaaggatccattgaaattaagaaaatcagatgtgtggagaaagtaaatctcgaggagcagacgcctgtagagagacagtacccatttcagattgtctataaagatgggcttctctatgtctatgcatcaaatgaagagagccgaagtcagtggttgaaagcattacaaaaagagataaggggtaacccccacctgctggtcaagtaccatagtgggttcttcgtggacgggaagttcctgtgttgccagcagagctgtaaagcagccccaggatgtaccctctgggaagcatatgctaatctgcatactgcagtcaatgaagagaaacacagagttcccaccttcccagacagagtgctgaagatacctcgggcagttcctgttctcaaaatggatgcaccatcttcaagtaccactctagcccaatatgacaacgaatcaaagaaaaactatggctcccagccaccatcttcaagtaccagtctagcgcaatatgacagcaactcaaagaaaatctatggctcccagccaaacttcaacatgcagtatattccaagggaagacttccctgactggtggcaagtaagaaaactgaaaagtagcagcagcagtgaagatgttgcaagcagtaaccaaaaagaaagaattgtgaatcacaccacctcaaagatttcatgggaattccctgagtcaagttcatctgaagaagaggaaaacctggatgattatgactggtttgctggtaacatctccagatcacaatctgaacagttactcagacaaaagggaaaagaaggagcatttatggttagaaattcgagccaagtgggaatgtacacagtgtccttatttagtaaggctgtgaatgataaaaaaggaactgtcaaacattaccacgtgcatacaaatgctgagaacaaattatacctggcagaaaactactgttttgattccattccaaagcttattcattatcatcaacacaattcagcaggcatgatcacacggctccgccaccctgtgtcaacaaaggccaacaaggtccccgactctgtgtccctgggaaatggaatctgggaactgaaaagagaagagattaccttgttgaaggagctgggaagtggccagtttggagtggtccagctgggcaagtggaaggggcagtatgatgttgctgttaagatgatcaaggagggctccatgtcagaagatgaattctttcaggaggcccagactatgatgaaactcagccatcccaagctggttaaattctatggagtgtgttcaaaggaataccccatatacatagtgactgaatatataagcaatggctgcttgctgaattacctgaggagtcacggaaaaggacttgaaccttcccagctcttagaaatgtgctacgatgtctgtgaaggcatggccttcttggagagtcaccaattcatacaccgggacttggctgctcgtaactgcttggtggacagagatctctgtgtgaaagtatctgactttggaatgacaaggtatgttcttgatgaccagtatgtcagttcagtcggaacaaagtttccagtcaagtggtcagctccagaggtgtttcattacttcaaatacagcagcaagtcagacgtatgggcatttgggatcctgatgtgggaggtgttcagcctggggaagcagccctatgacttgtatgacaactcccaggtggttctgaaggtctcccagggccacaggctttaccggccccacctggcatcggacaccatctaccagatcatgtacagctgctggcacgagcttccagaaaagcgtcccacatttcagcaactcctgtcttccattgaaccacttcgggaaaaagacaagcattga

SEQ ID NO: 301 - DNA, 1234 bp, Homo sapiens
atggtgtcccgggaccaggctcacctgggccccaagtatgtgggcctctgggacttcaagtcccggacggacgaggagctgagcttccgcgcgggggacgtcttccacgtggccaggaaggaggagcagtggtggtgggccacgctgctggacgaggcgggtggggccgtggcccagggctatgtgccccacaactacctggccgagagggagacggtggagtcggaacctgcgggacacgcaggctgtgcggcactacaagatctggcggcgtgccgggggccggctgcacctgaacgaggcggtgtccttcctcagcctgcccgagcttgtgaactaccacagggcccagagcctgtcccacggcctgcggctggccgcgccctgccggaagcacgagcctgagcccctgccccattgggatgactgggagaggccgagggaggagttcacgctctgcaggaagctggggtccggctactttggggaggtcttcgaggggctctggaaagaccgggtccaggtggccattaaggtgatttctcgagacaacctcctgcaccagcagatgctgcagtcggagatccaggccatgaagaagctgcggcacaaacacatcctggcgctgtacgccgtggtgtccgtgggggaccccgtgtacatcatcacggagctcatggccaagggcagcctgctggagctgctccgcgactctgatgagaaagtcctgcccgtttcggagctgctggacatcgcctggcaggtggctgagggcatgtgttacctggagtcgcagaattacatccaccgggacctggccgccaggaacatcctcgtcggggaaaacaccctctgcaaagttggggacttcgggttagccaggcttatcaaggaggacgtctacctctcccatgaccacaatatcccctacaagtggacggcccctgaagcgctctcccgaggccattactccaccaaatccgacgtctggtcctttgggattctcctgcatgagatgttcagcaggggtcaggtgccctacccaggcatgtccaaccatgaggccttcctgagggtggacgccggctaccgcatgccctgccctctggagtgcccgcccagcgtgcacaagctgatgctgacatgctggtgcagggaccccgagcagagaccctgcttcaaggccctgcgggagaggctctccagcttcaccagctacgagaacccgacctga

SEQ ID NO: 302 - DNA, 1980 bp, Homo sapiens
atggccgcagtgattctggagagcatctttctgaagcgatcccaacagaaaaagaaaacatcacctctaaacttcaagaagcgcctgtttctcttgaccgtgcacaaactctcctactatgagtatgactttgaacgtgggagaagaggcagtaagaagggttcaatagatgttgagaagatcacttgtgttgaaacagtggttcctgaaaaaaatcctcctccagaaagacagattccgagaagaggtgaagagtccagtgaaatggagcaaatttcaatcattgaaaggttcccttatcccttccaggttgtatatgatgaagggcctctctacgtcttctccccaactgaagaactaaggaagcggtggattcaccagctcaaaaacgtaatccggtacaacagtgatctggttcagaaatatcacccttgcttctggatcgatgggcagtatctctgctgctctcagacagccaaaaatgctatgggctgccaaattttggagaacaggaatggaagcttaaaacctgggagttctcaccggaagacaaaaaagcctcttcccccaacgcctgaggaggaccagatcttgaaaaagccactaccgcctgagccagcagcagcaccagtctccacaagtgagctgaaaaaggttgtggccctttatgattacatgccaatgaatgcaaatgatctacagctgcggaagggtgatgaatattttatcttggaggaaagcaacttaccatggtggagagcacgagataaaaatgggcaggaaggctacattcctagtaactatgtcactgaagcagaagactccatagaaatgtatgagtggtattccaaacacatgactcggagtcaggctgagcaactgctaaagcaagaggggaaagaaggaggtttcattgtcagagactccagcaaagctggcaaatatacagtgtctgtgtttgctaaatccacaggggaccctcaaggggtgatacgtcattatgttgtgtgttccacacctcagagccagtattacctggctgagaagcaccttttcagcaccatccctgagctcattaactaccatcagcacaactctgcaggactcatatccaggctcaaatatccagtgtctcaacaaaacaagaatgcaccttccactgcaggcctgggatacggatcatgggaaattgatccaaaggacctgaccttcttgaaggagctggggactggacaatttggggtagtgaagtatgggaaatggagaggccagtacgacgtggccatcaagatgatcaaagaaggctccatgtctgaagatgaattcattgaagaagccaaagtcatgatgaatctttcccatgagaagctggtgcagttgtatggcgtctgcaccaagcagcgccccatcttcatcatcactgagtacatggccaatggctgcctcctgaactacctgagggagatacgccaccgcttccagactcagcagctgctagagatgtgcaaggatgtctgtgaagccatggaatacctggagtcaaagcagttccttcaccgagacctggcagctcgaaactgtttggtaaacgatcaaggagttgttaaagtatctgatttcggcctgtccaggtatgtcctggatgatgaatacacaagctcagtaggctccaaatttccagtccggtggtccccaccggaagtcctgatgtatagcaagttcagcagcaaatctgacatttgggcttttggggttttgatgtgggaaatttactccctggggaagatgccatatgagagatttactaacagtgagactgctgaacacattgcccaaggcctacgtctctacaggcctcatctggcttcagagaaggtatataccatcatgtacagttgttggcatgagaaagcagatgagcgtcccactttcaaaattcttctgagcaatattctagatgtcatggatgaagaatcctga

SEQ ID NO: 303 - DNA, 1980 bp, Homo sapiens
atggccgcagtgattctggagagcatctttctgaagcgatcccaacagaaaaagaaaacatcacctctaaacttcaagaagcgcctgtttctcttgaccgtgcacaaactctcctactatgagtatgactttgaacgtgggagaagaggcagtaagaagggttcaatagatgttgagaagatcacttgtgttgaaacagtggttcctgaaaaaaatcctcctccagaaagacagattccgagaagaggtgaagagtccagtgaaatggagcaaatttcaatcattgaaaggttcccttatcccttccaggttgtatatgatgaagggcctctctacgtcttctccccaactgaagaactaaggaagcggtggattcaccagctcaaaaacgtaatccggtacaacagtgatctggttcagaaatatcacccttgcttctggatcgatgggcagtatctctgctgctctcagacagccaaaaatgctatgggctgccaaattttggagaacaggaatggaagcttaaaacctgggagttctcaccggaagacaaaaaagcctcttcccccaacgcctgaggaggaccagatcttgaaaaagccactaccgcctgagccagcagcagcaccagtctccacaagtgagctgaaaaaggttgtggccctttatgattacatgccaatgaatgcaaatgatctacagctgcggaagggtgatgaatattttatcttggaggaaagcaacttaccatggtggagagcacgagataaaaatgggcaggaaggctacattcctagtaactatgtcactgaagcagaagactccatagaaatgtatgagtggtattccaaacacatgactcggagtcaggctgagcaactgctaaagcaagaggggaaagaaggaggtttcattgtcagagactccagcaaagctggcaaatatacagtgtctgtgtttgctaaatccacaggggaccctcaaggggtgatacgtcattatgttgtgtgttccacacctcagagccagtattacctggctgagaagcaccttttcagcaccatccctgagctcattaactaccatcagcacaactctgcaggactcatatccaggctcaaatatccagtgtctcaacaaaacaagaatgcaccttccactgcaggcctgggatacggatcatgggaaattgatccaaaggacctgaccttcttgaaggagctggggactggacaatttggggtagtgaagtatgggaaatggagaggccagtacgacgtggccatcaagatgatcaaagaaggctccatgtctgaagatgaattcattgaagaagccaaagtcatgatgaatctttcccatgagaagctggtgcagttgtatggcgtctgcaccaagcagcgccccatcttcatcatcactgagtacatggccaatggctgcctcctgaactacctgagggagatgcgccaccgcttccagactcagcagctgctagagatgtgcaaggatgtctgtgaagccatggaatacctggagtcaaagcagttccttcaccgagacctggcagctcgaaactgtttggtaaacgatcaaggagttgttaaagtatctgatttcggcctgtccaggtatgtcctggatgatgaatacacaagctcagtaggctccaaatttccagtccggtggtccccaccggaagtcctgatgtatagcaagttcagcagcaaatctgacatttgggcttttggggttttgatgtgtgaaatttactccctggggaagatgccatatgagagatttactaacagtgagactgctgaacacattgcccaaggcctacgtctctacaggcctcatctggcttcagagaaggtatataccatcatgtacagttgttggcatgagaaagcagatgagcgtcccactttcaaaattcttctgagcaatattctagatgtcatggatgaagaatcctga

SEQ ID NO: 304 - DNA, 2508 bp, Homo sapiens
atgggaaattataaatctagaccaacccaaacttgtactgatgaatggaagaaaaaagtcagtgaatcatatgttatcacaatagaaagattagaagatgacctgcagatcaaggaaaaagaactgacagaactaaggaatatatttggctctgatgaagccttcagtaaagtcaatttaaattaccgcactgaaaatgggctgtctctacttcatttatgttgcatttgtggaggcaagaaatcacatattcgaactcttatgttgaaagggctccgcccatctcgactgacaagaaatggatttacagccttgcatttagcagtttacaaggataatgcagaattgatcacttctctgcttcacagtggagctgatatacagcaggttggatacggtggcctcactgccctccatattgctacaatagctggccacctagaggctgctgatgtgctgttgcaacatggagctaatgtcaatattcaagatgcagtttttttcactccattgcatattgcagcgtactatggacatgaacaggtaactcgccttcttttgaaatttggtgctgatgtaaatgtaagtggtgaagttggagatagacccctccacctagcatctgcaaaaggattcttgaatattgcaaaactcttgatggaagaaggcagcaaagcagatgtgaatgctcaagataatgaagaccatgtcccactccatttctgttctcgatttggacaccatgatatagttaagtatctgctgcaaagtgatttggaagttcaacctcatgttgttaatatctatggagatacccccttacacctggcatgctacaatggcaaatttgaagttgccaaggaaatcatccaaatatcaggaacagaaagtctgactaaggaaaacatcttcagtgaaacagcttttcatagtgcttgtacctatggcaagagcattgacctagtcaaatttcttcttgatcagaatgtcataaacatcaaccaccaaggaagggatgggcacactggattacactctgcttgctaccacggtcacattcgcctggttcagttcttactggataatggagctgatatgaatctagtggcttgtgatcccagcaggtctagtggtgaaaaagatgagcagacatgtttgatgtgggcttatgaaaaagggcatgatgccattgtcacactcctgaagcattataagagaccacaagatgaattgccctgtaatgaatattctcagcctggaggagatggctcctatgtgtctgttccatcacccttggggaagattaaaagcatgacaaaagagaaggcagatattctcctcctaagagctggattgccttcacatttccatcttcagctctcagaaattgagttccatgagattattggctcaggttcttttgggaaagtatataaaggacgatgcagaaataaaatagtggctataaaacgttatcgagccaatacctactgctccaagtcagatgtggatatgttttgccgagaggtgtccattctctgccagctcaatcatccctgcgtaattcagtttgtgggtgcttgcttgaatgatcccagccagtttgccattgtcactcaatacatatcagggggttctctgttctccctccttcatgagcagaagaggattcttgatttgcagtctaaattaattattgcagtagatgttgccaaaggcatggagtaccttcacaacctgacacagccaattatacatcgtgacttgaacagtcacaatattcttctctatgaggatgggcatgctgtggtggcagattttggagaatcaagatttctacagtctctggatgaagacaacatgacaaaacaacctgggaacctccgttggatggctcctgaggtgttcacgcagtgcactcggtacaccatcaaagcagatgtcttcagctatgctctgtgtctgtgggaaattctcactggcgaaattccattcgctcatctcaagccagcggctgcggcagcagacatggcttaccaccacatcagacctcccattggctattccattcccaagcccatatcatctctgctgatacgagggtggaacgcatgtcctgaaggaagacccgaattttctgaagttgtcatgaagttagaagagtgtctctgcaacattgagctgatgtctcctgcatcaagtaacagcagtgggtctctctcaccttcttcttcttctgattgcctggtgaaccggggaggacctggccggagtcatgtggcagcattaagaagtcgtttcgaattggaatatgctctaaatgcaaggtcctatgctgctttgtcccaaagtgctggacaatattcctctcaaggtctgtctttggaggagatgaaaagaagtcttcaatacacacccattgacaaatatggctatgtatccgatcccatgagctcaatgcattttcattcttgccgaaatagtagcagctttgaggacagcagctga

SEQ ID NO: 305 - DNA, 2508 bp, Homo sapiens; identical to SEQ ID NO: 304

SEQ ID NO: 306 - DNA, 2508 bp, Homo sapiens; identical to SEQ ID NO: 304

SEQ ID NO: 307 - DNA, 2508 bp, Homo sapiens; identical to SEQ ID NO: 304

SEQ ID NO: 308 - DNA, 2508 bp, Homo sapiens; identical to SEQ ID NO: 304

SEQ ID NO: 309 - DNA, 2508 bp, Homo sapiens; identical to SEQ ID NO: 304

SEQ ID NO: 310 - DNA, 2508 bp, Homo sapiens; identical to SEQ ID NO: 304

SEQ ID NO: 311 - DNA, 2508 bp, Homo sapiens; identical to SEQ ID NO: 304

SEQ ID NO: 312 - DNA, 2508 bp, Homo sapiens; identical to SEQ ID NO: 304

SEQ ID NO: 313 - DNA, 2508 bp, Homo sapiens; identical to SEQ ID NO: 304

SEQ ID NO: 314 - DNA, 2508 bp, Homo sapiens; identical to SEQ ID NO: 304

SEQ ID NO: 315 - DNA, 2508 bp, Homo sapiens; identical to SEQ ID NO: 304

SEQ ID NO: 316 - DNA, 2508 bp, Homo sapiens; identical to SEQ ID NO: 304

SEQ ID NO: 317 - DNA, 3213 bp, Homo sapiens
atgggagctgcgcggggatccccggccagaccccgccggttgcctctgctcagcgtcctgctgctgccgctgctgggcggtacccagacagccattgtcttcatcaagcagccgtcctcccaggatgcactgcaggggcgccgggcgctgcttcgctgtgaggttgaggctccgggcccggtacatgtgtactggctgctcgatggggcccctgtccaggacacggagcggcgtttcgcccagggcagcagcctgagctttgcagctgtggaccggctgcaggactctggcaccttccagtgtgtggctcgggataatgtcactggagaagaagcccgcagtgccaacgcctccttcaacatcaaatggattgaggcaggtcctgtggtcctgaagcatccagcctcggaagctgagatccagccacagacccaggtcacacttcgttgccacattgatgggcaccctcggcccacctaccaatggttccgagatgggacccccctttctgatggtcagagcaaccacacagtcagcagcaaggagcggaacctgacgctccggccagctggtcctgagcatagtgggctgtattcctgctgcgcccacagtgcttttggccaggcttgcagcagccagaacttcaccttgagcattgctgatgaaagctttgccagggtggtgctggcaccccaggacgtggtagtagcgaggtatgaggaggccatgttccattgccagttctcagcccagccacccccgagcctgcagtggctctttgaggatgagactcccatcactaaccgcagtcgccccccacacctccgcagagccacagtgtttgccaacgggtctctgctgctgacccaggtccggccacgcaatgcagggatctaccgctgcattggccaggggcagaggggcccacccatcatcctggaagccacacttcacctagcagagattgaagacatgccgctatttgagccacgggtgtttacagctggcagcgaggagcgtgtgacctgccttccccccaagggtctgccagagcccagcgtgtggtgggagcacgcgggagtccggctgcccacccatggcagggtctaccagaagggccacgagctggtgttggccaatattgctgaaagtgatgctggtgtctacacctgccacgcggccaacctggctggtcagcggagacaggatgtcaacatcactgtggccactgtgccctcctggctgaagaagccccaagacagccagctggaggagggcaaacccggctacttggattgcctgacccaggccacaccaaaacctacagttgtctggtacagaaaccagatgctcatctcagaggactcacggttcgaggtcttcaagaatgggaccttgcgcatcaacagcgtggaggtgtatgatgggacatggtaccgttgtatgagcagcaccccagccggcagcatcgaggcgcaagcccgtgtccaagtgctggaaaagctcaagttcacaccaccaccccagccacagcagtgcatggagtttgacaaggaggccacggtgccctgttcagccacaggccgagagaagcccactattaagtgggaacgggcagatgggagcagcctcccagagtgggtgacagacaacgctgggaccctgcattttgcccgggtgactcgagatgacgctggcaactacacttgcattgcctccaacgggccgcagggccagattcgtgcccatgtccagctcactgtggcagtttttatcaccttcaaagtggaaccagagcgtacgactgtgtaccagggccacacagccctactgcagtgcgaggcccagggggaccccaagccgctgattcagtggaaaggcaaggaccgcatcctggaccccaccaagctgggacccaggatgcacatcttccagaatggctccctggtgatccatgacgtggcccctgaggactcaggccgctacacctgcattgcaggcaacagctgcaacatcaagcacacggaggcccccctctatgtcgtggacaagcctgtgccggaggagtcggagggccctggcagccctcccccctacaagatgatccagaccattgggttgtcggtgggtgccgctgtggcctacatcattgccgtgctgggcctcatgttctactgcaagaagcgctgcaaagccaagcggctgcagaagcagcccgagggcgaggagccagagatggaatgcctcaacggtgggcctttgcagaacgggcagccctcagcagagatccaagaagaagtggccttgaccagcttgggctccggccccgcggccaccaacaaacgccacagcacaagtgataagatgcacttcccacggtctagcctgcagcccatcaccacgctggggaagagtgagtttggggaggtgttcctggcaaaggctcagggcttggaggagggagtggcagagaccctggtacttgtgaagagcctgcagagcaaggatgagcagcagcagctggacttccggagggagttggagatgtttgggaagctgaaccacgccaacgtggtgcggctcctggggctgtgccgggaggctgagccccactacatggtgctggaatatgtggatctgggagacctcaagcagttcctgaggatttccaagagcaaggatgaaaaattgaagtcacagcccctcagcaccaagcagaaggtggccctatgcacccaggtagccctgggcatggagcacctgtccaacaaccgctttgtgcataaggacttggctgcgcgtaactgcctggtcagtgcccagagacaagtgaaggtgtctgccctgggcctcagcaaggatgtgtacaacagtgagtactaccacttccgccaggcctgggtgccgctgcgctggatgtcccccgaggccatcctggagggtgacttctctaccaagtctgatgtctgggccttcggtgtgctgatgtgggaagtgtttacacatggagagatgccccatggtgggcaggcagatgatgaagtactggcagatttgcaggctgggaaggctagacttcctcagcccgagggctgcccttccaaactctatcggctgatgcagcgctgctgggccctcagccccaaggaccggccctccttcagtgagattgccagcgccctgggagacagcaccgtggacagcaagccgtga

SEQ ID NO: 318 - DNA, 3213 bp, Homo sapiens
atgggagctgcgcggggatccccggccagaccccgccggttgcctctgctcagcgtcctgctgctgccgctgctgggcggtacccagacagccattgtcttcatcaagcagccgtcctcccaggatgcactgcaggggcgccgggcgctgcttcgctgtgaggttgaggctccgggcccggtacatgtgtactggctgctcgatggggcccctgtccaggacacggagcggcgtttcgcccagggcagcagcctgagctttgcagctgtggaccggctgcaggactctggcaccttccagtgtgtggctcgggatgatgtcactggagaagaagcccgcagtgccaacgcctccttcaacatcaaatggattgaggcaggtcctgtggtcctgaagcatccagcctcggaagctgagatccagccacagacccaggtcacacttcgttgccacattgatgggcaccctcggcccacctaccaatggttccgagatgggacccccctttctgatggtcagagcaaccacacagtcagcagcaaggagcggaacctgacgctccggccagctggtcctgagcatagtgggctgtattcctgctgcgcccacagtgcttttggccaggcttgcagcagccagaacttcaccttgagcattgctgatgaaagctttgccagggtggtgctggcaccccaggacgtggtagtagcgaggtatgaggaggccatgttccattgccagttctcagcccagccacccccgagcctgcagtggctctttgaggatgagactcccatcactaaccgcagtcgccccccacacctccgcagagccacagtgtttgccaacgggtctctgctgctgacccaggtccggccacgcaatgcagggatctaccgctgcattggccaggggcagaggggcccacccatcatcctggaagccacacttcacctagcagagattgaagacatgccgctatttgagccacgggtgtttacagctggcagcgaggagcgtgtgacctgccttccccccaagggtctgccagagcccagcgtgtggtgggagcacgcgggagtccggctgcccacccatggcagggtctaccagaagggccacgagctggtgttggccaatattgctgaaagtgatgctggtgtctacacctgccacgcggccaacctggctggtcagcggagacaggatgtcaacatcactgtggcctctgtgccctcctggctgaagaagccccaagacagccagctggaggagggcaaacccggctacttggattgcctgacccaggccacaccaaaacctacagttgtctggtacagaaaccagatgctcatctcagaggactcacggttcgaggtcttcaagaatgggaccttgcgcatcaacagcgtggaggtgtatgatgggacatggtaccgttgtatgagcagcaccccagccggcagcatcgaggcgcaagcccgtgtccaagtgctggaaaagctcaagttcacaccaccaccccagccacagcagtgcatggagtttgacaaggaggccacggtgccctgttcagccacaggccgagagaagcccactattaagtgggaacgggcagatgggagcagcctcccagagtgggtgacagacaacgctgggaccctgcattttgcccgggtgactcgagatgacgctggcaactacacttgcattgcctccaacgggccgcagggccagattcgtgcccatgtccagctcactgtggcagtttttatcaccttcaaagtggaaccagagcgtacgactgtgtaccagggccacacagccctactgcagtgcgaggcccagggggaccccaagccgctgattcagtggaaaggcaaggaccgcatcctggaccccaccaagctgggacccaggatgcacatcttccagaatggctccctggtgatccatgacgtggcccctgaggactcaggccgctacacctgcattgcaggcaacagctgcaacatcaagcacacggaggcccccctctatgtcgtggacaagcctgtgccggaggagtcggagggccctggcagccctcccccctacaagatgatccagaccattgggttgtcggtgggtgccgctgtggcctacatcattgccgtgctgggcctcatgttctactgcaagaagcgctgcaaagccaagcggctgcagaagcagcccgagggcgaggagccagagatggaatgcctcaacggtgggcctttgcagaacgggcagccctcagcagagatccaagaagaagtggccttgaccagcttgggctccggccccgcggccaccaacaaacgccacagcacaagtgataagatgcacttcccacggtctagcctgcagcccatcaccacgctggggaagagtgagtttggggaggtgttcctggcaaaggctcagggcttggaggagggagtggcagagaccctggtacttgtgaagagcctgcagagcaaggatgagcagcagcagctggacttccggagggagttggagatgtttgggaagctgaaccacgccaacgtggtgcggctcctggggctgtgccgggaggctgagccccactacatggtgctggaatatgtggatctgggagacctcaagcagttcctgaggatttccaagagcaaggatgaaaaattgaagtcacagcccctcagcaccaagcagaaggtggccctatgcacccaggtagccctgggcatggagcacctgtccaacaaccgctttgtgcataaggacttggctgcgcgtaactgcctggtcagtgcccagagacaagtgaaggtgtctgccctgggcctcagcaaggatgtgtacaacagtgagtactaccacttccgccaggcctgggtgccgctgcgctggatgtcccccgaggccatcctggagggtgacttctctaccaagtctgatgtctgggccttcggtgtgctgatgtgggaagtgtttacacatggagagatgccccatggtgggcaggcagatgatgaagtactggcagatttgcaggctgggaaggctagacttcctcagcccgagggctgcccttccaaactctatcggctgatgcagcgctgctgggccctcagccccaaggaccggccctccttcagtgagattgccagcgccctgggagacagcaccgtggacagcaagccgtga

SEQ ID NO: 319 - DNA, 3213 bp, Homo sapiens
atgggagctgcgcggggatccccggccagaccccgccggttgcctctgctcagcgtcctgctgctgccgctgctgggcggtacccagacagccattgtcttcatcaagcagccgtcctcccaggatgcactgcaggggcgccgggcgctgcttcgctgtgaggttgaggctccgggcccggtacatgtgtactggctgctcgatggggcccctgtccaggacacggagcggcgtttcgcccagggcagcagcctgagctttgcagctgtggaccggctgcaggactctggcaccttccagtgtgtggctcgggatgatgtcactggagaagaagcccgcagtgccaacgcctccttcaacatcaaatggattgaggcaggtcctgtggtcctgaagcatccagcctcggaagctgagatccagccacagacccaggtcacacttcgttgccacattgatgggcaccctcggcccacctaccaatggttccgagatgggacccccctttctgatggtcagagcaaccacacagtcagcagcaaggagcggaacctgacgctccggccagctggtcctgagcatagtgggctgtattcctgctgcgcccacagtgcttttggccaggcttgcagcagccagaacttcaccttgagcattgctgatgaaagctttgccagggtggtgctggcaccccaggacgtggtagtagcgaggtatgaggaggccatgttccattgccagttctcagcccagccacccccgagcctgcagtggctctttgaggatgagactcccatcactaaccgcagtcgccccccacacctccgcagagccacagtgtttgccaacgggtctctgctgctgacccaggtccggccacgcaatgcagggatctaccgctgcattggccaggggcagaggggcccacccatcatcctggaagccacacttcacctagcagagattgaagacatgccgctatttgagccacgggtgtttacagctggcagcgaggagcgtgtgacctgccttccccccaagggtctgccagagcccagcgtgtggtgggagcacgcgggagtccggctgcccacccatggcagggtctaccagaagggccacgagctggtgttggccaatattgctgaaagtgatgctggtgtctacacctgccacgcggccaacctggctggtcagcggagacaggatgtcaacatcactgtggccactgtgccctcctggctgaagaagccccaagacagccagctggaggagggcaaacccggctacttggattgcctgacccaggccacaccaaaacctacagttgtctggtacagaaaccagatgctcatctcagaggactcacggttcgaggtcttcaagaatgggaccttgcgcatcaacagcgtggaggtgtatgatgggacatggtaccgttgtatgagcagcaccccagccggcagcatcgaggcgcaagcccgtgtccaagtgctggaaaagctcaagttcacaccaccaccccagccacagcagtgcatggagtttgacaaggaggccacggtgccctgttcagccacaggccgagagaagcccactattaagtgggaacgggcagatgggagcagcctcccagagtgggtgacagacaacgctgggaccctgcattttgcccgggtgactcgagatgacgctggcaactacacttgcattgcctccaacgggccgcagggccagattcgtgcccatgtccagctcactgtggcagtttttatcaccttcaaagtggaaccagagcgtacgactgtgtaccagggccacacagccctactgcagtgcgaggcccagggggaccccaagccgctgattcagtggaaaggcaaggaccgcatcctggaccccaccaagctgggacccaggatgcacatcttccagaatggctccctggtgatccatgacgtggcccctgaggactcaggccgctacacctgcattgcaggcaacagctgcaacatcaagcacacggaggcccccctctatgtcgtggacaagcctgtgccggaggagtcggagggccctggcagccctcccccctacaagatgatccagaccattgggttgtcggtgggtgccgctgtggcctacatcattgccgtgctgggcctcatgttctactgcaagaagcgctgcaaagccaagcggctgcagaagcagcccgagggcgaggagccagagctggaatgcctcaacggtgggcctttgcagaacgggcagccctcagcagagatccaagaagaagtggccttgaccagcttgggctccggccccgcggccaccaacaaacgccacagcacaagtgataagatgcacttcccacggtctagcctgcagcccatcaccacgctggggaagagtgagtttggggaggtgttcctggcaaaggctcagggcttggaggagggagtggcagagaccctggtacttgtgaagagcctgcagagcaaggatgagcagcagcagctggacttccggagggagttggagatgtttgggaagctgaaccacgccaacgtggtgcggctcctggggctgtgccgggaggctgagccccactacatggtgctggaatatgtggatctgggagacctcaagcagttcctgaggatttccaagagcaaggatgaaaaattgaagtcacagcccctcagcaccaagcagaaggtggccctatgcacccaggtagccctgggcatggagcacctgtccaacaaccgctttgtgcataaggacttggctgcgcgtaactgcctggtcagtgcccagagacaagtgaaggtgtctgccctgggcctcagcaaggatgtgtacaacagtgagtactaccacttccgccaggcctgggtgccgctgcgctggatgtcccccgaggccatcctggagggtgacttctctaccaagtctgatgtctgggccttcggtgtgctgatgtgggaagtgtttacacatggagagatgccccatggtgggcaggcagatgatgaagtactggcagatttgcaggctgggaaggctagacttcctcagcccgagggctgcccttccaaactctatcggctgatgcagcgctgctgggccctcagccccaaggaccggccctccttcagtgagattgccagcgccctgggagacagcaccgtggacagcaagccgtga

SEQ ID NO: 320 - DNA, 3213 bp, Homo sapiens
atgggagctgcgcggggatccccggccagaccccgccggttgcctctgctcagcgtcctgctgctgccgctgctgggcggtacccagacagccattgtcttcatcaagcagccgtcctcccaggatgcactgcaggggcgccgggcgctgcttcgctgtgaggttgaggctccgggcccggtacatgtgtactggctgctcgatggggcccctgtccaggacacggagcggcgtttcgcccagggcagcagcctgagctttgcagctgtggaccggctgcaggactctggcaccttccagtgtgtggctcgggatgatgtcactggagaagaagcccgcagtgccaacgcctccttcaacatcaaatggattgaggcaggtcctgtggtcctgaagcatccagcctcggaagctgagatccagccacagacccaggtcacacttcgttgccacattgatgggcaccctcggcccacctaccaatggttccgagatgggacccccctttctgatggtcagagcaaccacacagtcagcagcaaggagcggaacctgacgctccggccagctggtcctgagcatagtgggctgtattcctgctgcgcccacagtgcttttggccaggcttgcagcagccagaacttcaccttgagcattgctgatgaaagctttgccagggtggtgctggcaccccaggacgtggtagtagcgaggtatgaggaggccatgttccattgccagttctcagcccagccacccccgagcctgcagtggctctttgaggatgagactcccatcactaaccgcagtcgccccccacacctccgcagagccacagtgtttgccaacgggtctctgctgctgacccaggtccggccacgcaatgcagggatctaccgctgcattggccaggggcagaggggcccacccatcatcctggaagccacacttcacctagcagagattgaagacatgccgctatttgagccacgggtgtttacagctggcagcgaggagcgtgtgacctgccttccccccaagggtctgccagagcccagcgtgtggtgggagcacgcgggagtccggctgcccacccatggcagggtctaccagaagggccacgagctggtgttggccaatattgctgaaagtgatgctggtgtctacacctgccacgcggccaacctggctggtcagcggagacaggatgtcaacatcactgtggccactgtgccctcctggctgaagaagccccaagacagccagctggaggagggcaaacccggctacttggattgcctgacccaggccacaccaaaacctacagttgtctggtacagaaaccagatgctcatctcagaggactcacggttcgaggtcttcaagaatgggaccttgcgcatcaacagcgtggaggtgtatgatgggacatggtaccgttgtatgagcagcaccccagccggcagcatcgaggcgcaagcccgtgtccaagtgctggaaaagctcaagttcacaccaccaccccagccacagcagtgcatggagtttgacaaggaggccacggtgccctgttcagccacaggccgagagaagcccactattaagtgggaacgggcagatgggagcagcctcccagagtgggtgacagacaacgctgggaccctgcattttgcccgggtgactcgagatgacgctggcaactacacttgcattgcctccaacgggccgcagggccagattcgtgcccatgtccagctcactgtggcagtttttatcaccttcaaagtggaaccagagcgtacgactgtgtaccagggccacacagccctactgcagtgcgaggcccagggggaccccaagccgctgattcagtggaaaggcaaggaccgcatcctggaccccaccaagctgggacccaggatgcacatcttccagaatggctccctggtgatccatgacgtggcccctgaggactcaggccgctacacctgcattgcaggcaacagctgcaacatcaagcacacggaggcccccctctatgtcgtggacaagcctgtgccggaggagtcggagggccctggcagccctcccccctacaagatgatccagaccattgggttgtcggtgggtgccgctgtggcctacatcattgccgtgctgggcctcatgttctactgcaagaagcgctgcaaagccaagcggctgcagaagcagcccgagggcgaggagccagagatggaatgcctcaacggtgggcctttgcagaacgggcagccctcagcagagatccaagaagaagtggccttgaccagcttgggctccggccccgcggccaccaacaaacgccacagcacaagtgataagatgcacttcccacggtctagcctgcagcccatcaccacgctggggaagagtgagtttggggaggtgttcctggcaaaggctcagggcttggaggagggagtggcagagaccctggtacttgtgaagagcctgcagagcaaggatgagcagcagcagctggacttccggagggagttggagatgtttgggaagctgaaccacgccaacgtggtgcggctcctggggctgtgccgggaggctgagccccactacatggtgctggaatatgtggatctgggagacctcaagcagttcctgaggatttccaagagcaaggatgaaaaattgaagtcacagcccctcagcaccaagcagaaggtggccctatgcacccatgtagccctgggcatggagcacctgtccaacaaccgctttgtgcataaggacttggctgcgcgtaactgcctggtcagtgcccagagacaagtgaaggtgtctgccctgggcctcagcaaggatgtgtacaacagtgagtactaccacttccgccaggcctgggtgccgctgcgctggatgtcccccgaggccatcctggagggtgacttctctaccaagtctgatgtctgggccttcggtgtgctgatgtgggaagtgtttacacatggagagatgccccatggtgggcaggcagatgatgaagtactggcagatttgcaggctgggaaggctagacttcctcagcccgagggctgcccttccaaactctatcggctgatgcagcgctgctgggccctcagccccaaggaccggccctccttcagtgagattgccagcgccctgggagacagcaccgtggacagcaagccgtga

SEQ ID NO: 321 - DNA, 1353 bp, Homo sapiens
atgtcagcaatacaggccgcctggccatccggtacagaatgtattgccaagtacaacttccacggcactgccgagtaggacctgcccttctgcaaaggagacgtgctcaccattgtggccgtcaccaaggaccccaactggtacaaagccaaaaacaaggtgggccgtgagggcatcatcccagccaactacgtccagaagcgggagggcgtgaaggcgggtaccaaactcagcctcatgccttggttccacggcaagatcacacgggagcaggctgagcggcttctgtacccgccggagacaggcctgttcctggtgcgggagagcaccaactaccccggagactacacgctgtgcgtgagctgcgacggcaaggtggagcactaccgcatcatgtaccatgccagcaagctcagcatcgacgaggaggtgtactttgagaacctcatgcagctggtggagcactacacctcagacgcagatggactctgtacgcgcctcattaaaccaaaggtcatggagggcacagtggcggcccaggatgagttctaccgcagcggctgggccctgaacatgaaggagctgaagctgctgcagaccatcgggaagggggagttcggagacgtgatgctgggcgattaccgagggaacaaagtcgccgtcaagtgcattaagaacgacgccactgcccaggccttcctggctgaagcctcagtcatgacgcaactgcggcatagcaacctggtgcagctcctgggcgtgatcgtggaggagaagggcgggctctacatcgtcactgagtacatggccaaggggagccttgtggactacctgcggtctaggggtcggtcagtgctgggcggagactgtctcctcaagttctcgctagatgtctgcgaggccatggaatacctggagggcaacaatttcgtgcatcgagacctggctgcccgcaatgtgctggtgtctgaggacaacgtggccaaggtcagcgactttggtctcaccaaggaggcgtccagcacccaggacacgggcaagctgccagtcaagtggacagcccctgaggccctgagagagaagaaattctccactaagtctgacgtgtggagtttcggaatccttctctgggaaatctactcctttgggcgagtgccttatccaagaattcccctgaaggacgtcgtccctcgggtggagaagggctacaagatggatgcccccgacggctgcccgcccgcagtctatgaagtcatgaagaactgctggcacctggacgccgccatgcggccctccttcctacagctccgagagcagcttgagcacatcaaaacccacgagctgcacctgtga

SEQ ID NO: 322 - DNA, 2760 bp, Homo sapiens
atgggaccagaggccctgtcatctttactgctgctgctcttggtggcaagtggagatgctgacatgaagggacattttgatcctgccaagtgccgctatgccctgggcatgcaggaccggaccatcccagacagtgacatctctgcttccagctcctggtcagattccactgccgcctgccacagcaggttggagagcagtgacggggatggggcctggtgccccgcagggtcggtgtttcccaaggaggaggagtacttgcaggtggatctacaacgactgcacctggtggctctggtgggcacccagggacggcatgccgggggcctgggcaaggagttctcccggagctaccggctgcgttactcccgggatggtcgccgctggatgggctggaaggaccgctggggtcaggaggtgatctcaggcaatgaggaccctgagggagtggtgctgaaggaccttgggccccccatggttgcccgactggttcgcttctacccccgggctgaccgggtcatgagcgtctgtctgcgggtagagctctatggctgcctctggagggatggactcctgtcttacaccgcccctgtggggcagacaatgtatttatctgaggccgtgtacctcaacgactccacctatgacggacataccgtgggcggactgcagtatgggggtctgggccagctggcagatggtgtggtggggctggatgactttaggaagagtcaggagctgcgggtctggccaggctatgactatgtgggatggagcaaccacagcttctccagtggctatgtggagatggagtttgagtttgaccggctgagggccttccaggctatgcaggtccactgtaacaacatgcacacgctgggagcccgtctgcctggcggggtggaatgtcgcttccggcgtggccctgccatggcctgggagggggagcccatgcgccacaacctagggggcaacctgggggaccccagagcccgggctgtctcagtgccccttggcggccgtgtggctcgctttctgcagtgccgcttcctctttgcggggccctggttactcttcagcgaaatctccttcatctctgatgtggtgaacaattcctctccggcactgggaggcaccttcccgccagccccctggtggccgcctggcccacctcccaccaacttcagcagcttggagctggagcccagaggccagcagcccgtggccaaggccgaggggagcccgaccgccatcctcatcggctgcctggtggccatcatcctgctcctgctgctcatcattgccctcatgctctggcggctgcactggcgcaggctcctcagcaaggctgaacggagggtgttggaagaggagctgacggttcacctctctgtccctggggacactatcctcatcaacaaccgcccaggtcctagagagccacccccgtaccaggagccccggcctcgtgggaatccgccccactccgctccctgtgtccccaatggctctgcgttgctgctctccaatccagcctaccgcctccttctggccacttacgcccgtccccctcgaggcccgggcccccccacacccgcctgggccaaacccaccaacacccaggcctacagtggggactatatggagcctgagaagccaggcgccccgcttctgcccccacctccccagaacagcgtcccccattatgccgaggctgacattgttaccctgcagggcgtcaccgggggcaacacctatgctgtgcctgcactgcccccaggggcagtcggggatgggccccccagagtggatttccctcgatctcgactccgcttcaaggagaagcttggcgagggccagtttggggaggtgcacctgtgtgaggtcgacagccctcaagatctggttagtcttgatttcccccttaatgtgcgtaagggacaccctttgctggtagctgtcaagatcttacggccagatgccaccaagaatgccagcttctccttgttctccaggaatgatttcctgaaagaggtgaagatcatgtcgaggctcaaggacccaaacatcattcggctgctgggcgtgtgtgtgcaggacgaccccctctgcatgattactgactacatggagaacggcgacctcaaccagttcctcagtgcccaccagctggaggacaaggcagccgagggggcccctggggacgggcaggctgcgcaggggcccaccatcagctacccaatgctgctgcatgtggcagcccagatcgcctccggcatgcgctatctggccacactcaactttgtacatcgggacctggccacgcggaactgcctagttggggaaaatttcaccatcaaaatcgcagactttggcatgagccggaacctctatgctggggactattaccgtgtgcagggccgggcagtgctgcccatccgctggatggcctgggagtgcatcctcatggggaagttcacgactgcgagtgacgtgtgggcctttggtgtgaccctgtgggaggtgctgatgctctgtagggcccagccctttgggcagctcaccgacgagcaggtcatcgagaacgcgggggagttcttccgggaccagggccggcaggtgtacctgtcccggccgcctgcctgcccgcagggcctatatgagctgatgcttcggtgctggagccgggagtctgagcagcgaccacccttttcccagctgcatcggttcctggcagaggatgcactcaacacggtgtga

SEQ ID NO: 323 - DNA, 2760 bp, Homo sapiens
atgggaccagaggccctgtcatctttactgctgctgctcttggtggcaagtggagatgctgacatgaagggacattttgatcctgccaagtgccgctatgccctgggcatgcaggaccggaccatcccagacagtgacatctctgcttccagctcctggtcagattccactgccgcccgccacagcaggttggagagcagtgacggggatggggcctggtgccccgcagggtcggtgtttcccaaggaggaggagtacttgcaggtggatctacaacgactgcacctggtggctctggcgggcacccagggacggcatgccgggggcctgggcaaggagttctcccggagctaccggctgcgttactcccgggatggtcgccgctggatgggctggaaggaccgctggggtcaggaggtgatctcaggcaatgaggaccctgagggagtggtgctgaaggaccttgggccccccatggttgcccgactggttcgcttctacccccgggctgaccgggtcatgagcgtctgtctgcgggtagagctctatggctgcctctggagggatggactcctgtcttacaccgcccctgtggggcagacaatgtatttatctgaggccgtgtacctcaacgactccacctatgacggacataccgtgggcggactgcagtatgggggtctgggccagctggcagatggtgtggtggggctggatgactttaggaagagtcaggagctgcgggtctggccaggctatgactatgtgggatggagcaaccacagcttctccagtggctatgtggagatggagtttgagtttgaccggctgagggccttccaggctatgcaggtccactgtaacaacatgcacacgctgggagcccgtctgcctggcggggtggaatgtcgcttccggcgtggccctgccatggcctgggagggggagcccatgcgccacaacctagggggcaacctgggggaccccagagcccgggctgtctcagtgccccttggcggccgtgtggctcgctttctgcagtgccgcttcctctttgcggggccctggttactcttcagcgaaatctccttcatctctgatgtggtgaacaattcctctccggcactgggaggcaccttcccgccagccccctggtggccgcctggcccacctcccaccaacttcagcagcttggagctggagcccagaggccagcagcccgtggccaaggccgaggggagcccgaccgccatcctcatcggctgcctggtggccatcatcctgctcctgctgctcatcattgccctcatgctctggcggctgcactggcgcaggctcctcagcaaggctgaacggagggtgttggaagaggagctgacggttcacctctctgtccctggggacactatcctcatcaacaaccgcccaggtcctagagagccacccccgtaccaggagccccggcctcgtgggaatccgccccactccgctccctgtgtccccaatggctctgcgttgctgctctccaatccagcctaccgcctccttctggccacttacgcccgtccccctcgaggcccgggcccccccacacccgcctgggccaaacccaccaacacccaggcctacagtggggactatatggagcctgagaagccaggcgccccgcttctgcccccacctccccagaacagcgtcccccattatgccgaggctgacattgttaccctgcagggcgtcaccgggggcaacacctatgctgtgcctgcactgcccccaggggcagtcggggatgggccccccagagtggatttccctcgatctcgactccgcttcaaggagaagcttggcgagggccagtttggggaggtgcacctgtgtgaggtcgacagccctcaagatctggttagtcttgatttcccccttaatgtgcgtaagggacaccctttgctggtagctgtcaagatcttacggccagatgccaccaagaatgccagcttctccttgttctccaggaatgatttcctgaaagaggtgaagatcatgtcgaggctcaaggacccaaacatcattcggctgctgggcgtgtgtgtgcaggacgaccccctctgcatgattactgactacatggagaacggcgacctcaaccagttcctcagtgcccaccagctggaggacaaggcagccgagggggcccctggggacgggcaggctgcgcaggggcccaccatcagctacccaatgctgctgcatgtggcagcccagatcgcctccggcatgcgctatctggccacactcaactttgtacatcgggacctggccacgcggaactgcctagttggggaaaatttcaccatcaaaatcgcagactttggcatgagccggaacctctatgctggggactattaccgtgtgcagggccgggcagtgctgcccatccgctggatggcctgggagtgcatcctcatggggaagttcacgactgcgagtgacgtgtgggcctttggtgtgaccctgtgggaggtgctgatgctctgtagggcccagccctttgggcagctcaccgacgagcaggtcatcgagaacgcgggggagttcttccgggaccagggccggcaggtgtacctgtcccggccgcctgcctgcccgcagggcctatatgagctgatgcttcggtgctggagccgggagtctgagcagcgaccacccttttcccagctgcatcggttcctggcagaggatgcactcaacacggtgtga

SEQ ID NO: 324 - DNA, 2760 bp, Homo sapiens
atgggaccagaggccctgtcatctttactgctgctgctcttggtggcaagtggagatgctgacatgaagggacattttgatcctgccaagtgccgctatgccctgggcatgcaggaccggaccatcccagacagtgacatctctgcttccagctcctggtcagattccactgccgcccgccacagcaggttggagagcagtgacggggatggggcctggtgccccgcagggtcggtgtttcccaaggaggaggagtacttgcaggtggatctacaacgactgcacctggtggctctggtgggcacccagggacggcatgccgggggcctgggcaaggagttctcccggagctaccggctgcgttactcccgggatggtcgccgctggatgggctggaaggaccgctggggtcaggaggtgatctcaggcaatgaggaccctgagggagtggtgctgaaggaccttgggccccccatggttgcccgactggttcgcttctacccccgggctgaccgggtcatgagcgtctgtctgcgggtagagctctatggctgcctctggagggatggactcctgtcttacaccgcccctgtggggcagacaatgtatttatctgaggccgtgtacctcaacgactccacctatgacggacataccgtgggcggactgcagtatgggggtctgggccagctggcagatggtgtggtggggctggatgactttaggaagagtcaggagctgtgggtctggccaggctatgactatgtgggatggagcaaccacagcttctccagtggctatgtggagatggagtttgagtttgaccggctgagggccttccaggctatgcaggtccactgtaacaacatgcacacgctgggagcccgtctgcctggcggggtggaatgtcgcttccggcgtggccctgccatggcctgggagggggagcccatgcgccacaacctagggggcaacctgggggaccccagagcccgggctgtctcagtgccccttggcggccgtgtggctcgctttctgcagtgccgcttcctctttgcggggccctggttactcttcagcgaaatctccttcatctctgatgtggtgaacaattcctctccggcactgggaggcaccttcccgccagccccctggtggccgcctggcccacctcccaccaacttcagcagcttggagctggagcccagaggccagcagcccgtggccaaggccgaggggagcccgaccgccatcctcatcggctgcctggtggccatcatcctgctcctgctgctcatcattgccctcatgctctggcggctgcactggcgcaggctcctcagcaaggctgaacggagggtgttggaagaggagctgacggttcacctctctgtccctggggacactatcctcatcaacaaccgcccaggtcctagagagccacccccgtaccaggagccccggcctcgtgggaatccgccccactccgctccctgtgtccccaatggctctgcgttgctgctctccaatccagcctaccgcctccttctggccacttacgcccgtccccctcgaggcccgggcccccccacacccgcctgggccaaacccaccaacacccaggcctacagtggggactatatggagcctgagaagccaggcgccccgcttctgcccccacctccccagaacagcgtcccccattatgccgaggctgacattgttaccctgcagggcgtcaccgggggcaacacctatgctgtgcctgcactgcccccaggggcagtcggggatgggccccccagagtggatttccctcgatctcgactccgcttcaaggagaagcttggcgagggccagtttggggaggtgcacctgtgtgaggtcgacagccctcaagatctggttagtcttgatttcccccttaatgtgcgtaagggacaccctttgctggtagctgtcaagatcttacggccagatgccaccaagaatgccagcttctccttgttctccaggaatgatttcctgaaagaggtgaagatcatgtcgaggctcaaggacccaaacatcattcggctgctgggcgtgtgtgtgcaggacgaccccctctgcatgattactgactacatggagaacggcgacctcaaccagttcctcagtgcccaccagctggaggacaaggcagccgagggggcccctggggacgggcaggctgcgcaggggcccaccatcagctacccaatgctgctgcatgtggcagcccagatcgcctccggcatgcgctatctggccacactcaactttgtacatcgggacctggccacgcggaactgcctagttggggaaaatttcaccatcaaaatcgcagactttggcatgagccggaacctctatgctggggactattaccgtgtgcagggccgggcagtgctgcccatccgctggatggcctgggagtgcatcctcatggggaagttcacgactgcgagtgacgtgtgggcctttggtgtgaccctgtgggaggtgctgatgctctgtagggcccagccctttgggcagctcaccgacgagcaggtcatcgagaacgcgggggagttcttccgggaccagggccggcaggtgtacctgtcccggccgcctgcctgcccgcagggcctatatgagctgatgcttcggtgctggagccgggagtctgagcagcgaccacccttttcccagctgcatcggttcctggcagaggatgcactcaacacggtgtga

SEQ ID NO: 325 - DNA, 2568 bp, Homo sapiens
atgatcctgattcccagaatgctcttggtgctgttcctgctgctgcctatcttgagttctgcaaaagctcaggttaatccagctatatgccgctatcctctgggcatgtcaggaggccagattccagatgaggacatcacagcttccagtcagtggtcagagtccacagctgccaaatatggaaggctggactcagaagaaggggatggagcctggtgccctgagattccagtggaacctgatgacctgaaggagtttctgcagattgacttgcacaccctccattttatcactctggtggggacccaggggcgccatgcaggaggtcatggcatcgagtttgcccccatatacaagatcaattacagtcgggatggcactcgctggatctcttggcggaaccgtcatgggaaacaggtgctggatggaaatagtaacccctatgacattttcctaaaggacttggagccgcccattgtagccagatttgtccggttcattccagtcaccgaccactccatgaatgtgtgtatgagagtggagctttacggctgtgtctggctagatggcttggtgtcttacaatgctccagctgggcagcagtttgtactccctggaggttccatcatttatctgaatgattctgtctatgatggagctgttggatacagcatgacagaagggctaggccaattgaccgatggtgtgtctggcctggacgatttcacccagacccatgaataccacgtgtggcccggctatgactatgtgggctggcggaacgagagtgccaccaatggctacattgagatcatgtttgaatttgaccgcatcaggaatttcactaccatgaaggtccactgcaacaacatgtttgctaaaggtgtgaagatctttaaggaggtacagtgctacttccgctctgaagccagtgagtgggaacctaatgccatttccttcccccttgtcctggatgacgtcaaccccagtgctcggtttgtcacggtgcctctccaccaccgaatggccagtgccatcaagtgtcaataccattttgcagatacctggatgatgttcagtgagatcaccttccaatcagatgctgcaatgtacaacaactctgaagccctgcccacctctcctatggcacccacaacctatgatccaatgcttaaagttgatgacagcaacactcggatcctgattggctgcttggtggccatcatctttatcctcctggccatcattgtcatcatcctctggaggcagttctggcagaaaatgctggagaaggcttctcggaggatgctggatgatgaaatgacagtcagcctttccctgccaagtgattctagcatgttcaacaataaccgctcctcatcacctagtgaacaagggtccaactcgacttacgatcgcatctttccccttcgccctgactaccaggagccatccaggctgatacgaaaactcccagaatttgctccaggggaggaggagtcaggctgcagcggtgttgtgaagccagtccagcccagtggccctgagggggtgccccactatgcagaggctgacatagtgaacctccaaggagtgacaggaggcaacacatactcagtgcctgccgtcaccatggacctgctctcaggaaaagatgtggctgtggaggagttccccaggaaactcctaactttcaaagagaagctgggagaaggacagtttggggaggttcatctctgtgaagtggagggaatggaaaaattcaaagacaaagattttgccctagatgtcagtgccaaccagcctgtcctggtggctgtgaaaatgctccgagcagatgccaacaagaatgccaggaatgattttcttaaggagataaagatcatgtctcggctcaaggacccaaacatcatccatctattagctgtgtgtatcactgatgaccctctctgtatgatcactgaatacatggagaatggagatctcaatcagtttctttcccgccacgagccccctaattcttcctccagcgatgtacgcactgtcagttacaccaatctgaagtttatggctacccaaattgcctctggcatgaagtacctttcctctcttaattttgttcaccgagatctggccacacgaaactgtttagtgggtaagaactacacaatcaagatagctgactttggaatgagcaggaacctgtacagtggtgactattaccggatccagggccgggcagtgctccctatccgctggatgtcttgggagagtatcttgctgggcaagttcactacagcaagtgatgtgtgggcctttggggttactttgtgggagactttcaccttttgtcaagaacagccctattcccagctgtcagatgaacaggttattgagaatactggagagttcttccgagaccaagggaggcagacttacctccctcaaccagccatttgtcctgactctgtgtataagctgatgctcagctgctggagaagagatacgaagaaccgtccctcattccaagaaatccaccttctgctccttcaacaaggcgacgagtga

SEQ ID NO: 326 - DNA, 2568 bp, Homo sapiens
atgatcctgattcccagaatgctcttggtgctgttcctgctgctgcctatcttgagttctgcaaaagctcaggttaatccagctatatgccgctatcctctgggcatgtcaggaggccagattccagatgaggacatcacagcttccagtcagtggtcagagtccacagctgccaaatatggaaggctggactcagaagaaggggatggagcctggtgccctgagattccagtggaacctgatgacctgaaggagtttctgcagattgacttgcacaccctccattttatcactctggtggggacccaggggcgccatgcaggaggtcatggcatcgagtttgcccccatgtacaagatcaattacagtcgggatggcactcgctggatctcttggcggaaccgtcatgggaaacaggtgctggatggaaatagtaacccctatgacattttcctaaaggacttggagccgcccattgtagccagatttgtccggttcattccagtcaccgaccactccatgaatgtgtgtatgagagtggagctttacggctgtgtctggctagatggcttggtgtcttacaatgctccagctgggcagcagtttgtactccctggaggttccatcatttatctgaatgattctgtctatgatggagctgttggatacagcatgacagaagggctaggccaattgaccgatggtgtgtctggcctggacgatttcacccagacccatgaataccacgtgtggcccggctatgactatgtgggctggcggaacgagagtgccaccaatggctacattgagatcatgtttgaatttgaccgcatcaggaatttcactaccatgaaggtccactgcaacaacatgtttgctaaaggtgtgaagatctttaaggaggtacagtgctacttccgctctgaagccagtgagtgggaacctaatgccatttccttcccccttgtcctggatgacgtcaaccccagtgctcggtttgtcacggtgcctctccaccaccgaatggccagtgccatcaagtgtcaataccattttgcagatacctggatgatgttcagtgagatcaccttccaatcagatgctgcaatgtacaacaactctgaagccctgcccacctctcctatggcacccacaacctatgatccaatgcttaaagttgatgacagcaacactcggatcctgattggctgcttggtggccatcatctttatcctcctggccatcattgtcatcatcctctggaggcagttctggcagaaaatgctggagaaggcttctcggaggatgctggatgatgaaatgacagtcagcctttccctgccaagtgattctagcatgttcaacaataaccgctcctcatcacctagtgaacaagggtccaactcgacttacgatcgcatctttcccctttgccctgactaccaggagccatccaggctgatacgaaaactcccagaatttgctccaggggaggaggagtcaggctgcagcggtgttgtgaagccagtccagcccagtggccctgagggggtgccccactatgcagaggctgacatagtgaacctccaaggagtgacaggaggcaacacatactcagtgcctgccgtcaccatggacctgctctcaggaaaagatgtggctgtggaggagttccccaggaaactcctaactttcaaagagaagctgggagaaggacagtttggggaggttcatctctgtgaagtggagggaatggaaaaattcaaagacaaagattttgccctagatgtcagtgccaaccagcctgtcctggtggctgtgaaaatgctccgagcagatgccaacaagaatgccaggaatgattttcttaaggagataaagatcatgtctcggctcaaggacccaaacatcatccatctattagctgtgtgtatcactgatgaccctctctgtatgatcactgaatacatggagaatggagatctcaatcagtttctttcccgccacgagccccctaattcttcctccagcgatgtacgcactgtcagttacaccaatctgaagtttatggctacccaaattgcctctggcatgaagtacctttcctctcttaattttgttcaccgagatctggccacacgaaactgtttagtgggtaagaactacacaatcaagatagctgactttggaatgagcaggaacctgtacagtggtgactattaccggatccagggccgggcagtgctccctatccgctggatgtcttgggagagtatcttgctgggcaagttcactacagcaagtgatgtgtgggcctttggggttactttgtgggagactttcaccttttgtcaagaacagccctattcccagctgtcagatgaacaggttattgagaatactggagagttcttccgagaccaagggaggcagacttacctccctcaaccagccatttgtcctgactctgtgtataagctgatgctcagctgctggagaagagatacgaagaaccgtccctcattccaagaaatccaccttctgctccttcaacaaggcgacgagtga

SEQ ID NO: 327 - DNA, 3633 bp, Homo sapiens
atgcgaccctccgggacggccggggcagcgctcctggcgctgctggctgcgctctgcccggcgagtcgggctctggaggaaaagaaagtttgccaaggcacgagtaacaagctcacgcagttgggcacttttgaagatcattttctcagcctccagaggatgttcaataactgtgaggtggtccttgggaatttggaaattacctatgtgcagaggaattatgatctttccttcttaaagaccatccaggaggtggctggttatgtcctcattgccctcaacacagtggagcgaattcctttggaaaacctgcagatcatcagaggaaatatgtactacgaaaaatcctatgccttagcagtcttatctaactatgatgcaaataaaaccggactgaaggagctgcccatgagaaatttacaggaaatcctgcatggcgccgtgcggttcagcaacaaccctgccctgtgcaacgtggagagcatccagtggcgggacatagtcagcagtgactttctcagcaacatgtcgatggacttccagaaccacctgggcagctgccaaaagtgtgatccaagctgtcccaatgggagctgctggggtgcaggagaggagaactgccagaaactgaccaaaatcatctgtgcccagcagtgctccgggcgctgccgtggcaagtcccccagtgactgctgccacaaccagtgtgctgcaggctgcacaggcccccgggagagcgactgcctggtctgccgcaaattccgagacgaagccacgtgcaaggacacctgccccccactcatgctctacaaccccaccacgtaccagatggatgtgaaccccgagggcaaatacagctttggtgccacctgcgtgaagaagtgtccccgtaattatgtggtgacagatcacggctcgtgcgtccgagcctgtggggccgacagctatgagatggaggaagacggcgtccgcaagtgtaagaagtgcgaagggccttgccgcaaagtgtgtaacggaataggtattggtgaatttaaagactcactctccataaatgctacgaatattaaacacttcaaaaactgcacctccatcagtggcgatctccacatcctgccggtggcatttaggggtgactccttcacacatactcctcctctggatccacaggaactggatattctgaaaaccgtaaaggaaatcacagggtttttgctgattcaggcttggcctgaaaacaggacggacctccatgcctttgagaacctagaaatcatacgcggcaggaccaagcaacatggtcagttttctcttgcagtcgtcagcctgaacataacatccttgggattacgctccctcaaggagataagtgatggagatgtgataatttcaggaaacaaaaatttgtgctatgcaaatacaataaactggaaaaaactgtttgggacctccggtcagaaaaccaaaattataagcaacagaggtgaaaacagctgcaaggccacaggccaggtctgccatgccttgtgctcccccgagggctgctggggcccggagcccagggactgcgtctcttgccggaatgtcagccgaggcagggaatgcgtggacaagtgcaaccttctggagggtgagccaagggagtttgtggagaactctgagtgcatacagtgccacccagagtgcctgcctcaggccatgaacatcacctgcacaggacggggaccagacaactgtatccagtgtgcccactacattgacggcccccactgcgtcaagacctgcccggcaggagtcatgggagaaaacaacaccctggtctggaagtacgcagacgccggccatgtgtgccacctgtgccatccaaactgcacctacggatgcactgggccaggtcttgaaggctgtccaacgaatgggcctaagatcccgtccatcgccactgggatggtgggggccctcctcttgctgctggtggtggccctggggatcggcctcttcatgcgaaggcgccacatcgttcggaagcgcacgctgcggaggctgctgcaggagagggagcttgtggagcctcttacacccagtggagaagctcccaaccaagctctcttgaggatcttgaaggaaactgaattcaaaaagatcaaagtgctgggctccggtgcgttcggcacggtgtataagggactctggatcccagaaggtgagaaagttaaaattcccgtcgctatcaaggaattaagagaagcaacatctccgaaagccaacaaggaaatcctcgatgaagcctacgtgatggccagcgtggacaacccccacgtgtgccgcctgctgggcatctgcctcacctccaccgtgcagctcatcacgcagctcatgcccttcggctgcctcctggactatgtccgggaacacaaagacaatattggctcccagtacctgctcaactggtgtgtgcagatcgcaaagggcatgaactacttggaggaccgtcgcttggtgcaccgcgacctggcagccaggaacgtactggtgaaaacaccgcagcatgtcaagatcacagattttgggctggccaaactgctgggtgcggaagagaaagaataccatgcagaaggaggcaaagtgcctatcaagtggatggcattggaatcaattttacacagaatctatacccaccagagtgatgtctggagctacggggtgaccgtttgggagttgatgacctttggatccaagccatatgacggaatccctgccagcgagatctcctccatcctggagaaaggagaacgcctccctcagccacccatatgtaccatcgatgtctacatgatcatggtcaagtgctggatgatagacgcagatagtcgcccaaagttccgtgagttgatcatcgaattctccaaaatggcccgagacccccagcgctaccttgtcattcagggggatgaaagaatgcatttgccaagtcctacagactccaacttctaccgtgccctgatggatgaagaagacatggacgacgtggtggatgccgacgagtacctcatcccacagcagggcttcttcagcagcccctccacgtcacggactcccctcctgagctctctgagtgcaaccagcaacaattccaccgtggcttgcattgatagaaatgggctgcaaagctgtcccatcaaggaagacagcttcttgcagcgatacagctcagaccccacaggcgccttgactgaggacagcatagacgacaccttcctcccagtgcctgaatacataaaccagtccgttcccaaaaggcccgctggctctgtgcagaatcctgtctatcacaatcagcctctgaaccccgcgcccagcagagacccacactaccaggacccccacagcactgcagtgggcaaccccgagtatctcaacactgtccagcccacctgtgtcaacagcacattcgacagccctgcccactgggcccagaaaggcagccaccaaattagcctggacaaccctgactaccagcaggacttctttcccaaggaagccaagccaaatggcatctttaagggctccacagctgaaaatgcagaatacctaagggtcgcgccacaaagcagtgaatttattggagcatga

SEQ ID NO: 328 - DNA, 3633 bp, Homo sapiens
atgcgaccctccgggacggccggggcagcgctcctggcgctgctggctgcgctctgcccggcgagtcgggctctggaggaaaagaaagtttgccaaggcacgagtaacaagctcacgcagttgggcacttttgaagatcattttctcagcctccagaggatgttcaataactgtgaggtggtccttgggaatttggaaattacctatgtgcagaggaattatgatctttccttcttaaagaccatccaggaggtggctggttatgtcctcattgccctcaacacagtggagcgaattcctttggaaaacctgcagatcatcagaggaaatatgtactacgaaaattcctatgccttagcagtcttatctaactatgatgcaaataaaaccggactgaaggagctgcccatgagaaatttacaggaaatcctgcatggcgccgtgcggttcagcaacaaccctgccctgtgcaacgtggagagcatccagtggcgggacatagtcagcagtgactttctcagcaacatgtcgatggacttccagaaccacctgggcagctgccaaaagtgtgatccaagctgtcccaatgggagctgctggggtgcaggagaggagaactgccagaaactgaccaaaatcatctgtgcccagcagtgctccgggcgctgccgtggcaagtcccccagtgactgctgccacaaccagtgtgctgcaggctgcacaggcccccgggagagcgactgcctggtctgccgcaaattccgagacgaagccacgtgcaaggacacctgccccccactcatgctctacaaccccaccacgtaccagatggatgtgaaccccgagggcaaatacagctttggtgtcacctgcgtgaagaagtgtccccgtaattatgtggtgacagatcacggctcgtgcgtccgagcctgtggggccgacagctatgagatggaggaagacggcgtccgcaagtgtaagaagtgcgaagggccttgccgcaaagtgtgtaacggaataggtattggtgaatttaaagactcactctccataaatgctacgaatattaaacacttcaaaaactgcacctccatcagtggcgatctccacatcctgccggtggcatttaggggtgactccttcacacatactcctcctctggatccacaggaactggatattctgaaaaccgtaaaggaaatcacagggtttttgctgattcaggcttggcctgaaaacaggacggacctccatgcctttgagaacctagaaatcatacgcggcaggaccaagcaacatggtcagttttctcttgcagtcgtcagcctgaacataacatccttgggattacgctccctcaaggagataagtgatggagatgtgataatttcaggaaacaaaaatttgtgctatgcaaatacaataaactggaaaaaactgtttgggacctccggtcagaaaaccaaaattataagcaacagaggtgaaaacagctgcaaggccacaggccaggtctgccatgccttgtgctcccccgagggctgctggggcccggagcccagggactgcgtctcttgccggaatgtcagccgaggcagggaatgcgtggacaagtgcaaccttctggagggtgagccaagggagtttgtggagaactctgagtgcatacagtgccacccagagtgcctgcctcaggccatgaacatcacctgcacaggacggggaccagacaactgtatccagtgtgcccactacattgacggcccccactgcgtcaagacctgcccggcaggagtcatgggagaaaacaacaccctggtctggaagtacgcagacgccggccatgtgtgccacctgtgccatccaaactgcacctacggatgcactgggccaggtcttgaaggctgtccaacgaatgggcctaagatcccgtccatcgccactgggatggtgggggccctcctcttgctgctggtggtggccctggggatcggcctcttcatgcgaaggcgccacatcgttcggaagcgcacgctgcggaggctgctgcaggagagggagcttgtggagcctcttacacccagtggagaagctcccaaccaagctctcttgaggatcttgaaggaaactgaattcaaaaagatcaaagtgctgggctccggtgcgttcggcacggtgtataagggactctggatcccagaaggtgagaaagttaaaattcccgtcgctatcaaggaattaagagaagcaacatctccgaaagccaacaaggaaatcctcgatgaagcctacgtgatggccagcgtggacaacccccacgtgtgccgcctgctgggcatctgcctcacctccaccgtgcagctcatcacgcagctcatgcccttcggctgcctcctggactatgtccgggaacacaaagacaatattggctcccagtacctgctcaactggtgtgtgcagatcgcaaagggcatgaactacttggaggaccgtcgcttggtgcaccgcgacctggcagccaggaacgtactggtgaaaacaccgcagcatgtcaagatcacagattttgggctggccaaactgctgggtgcggaagagaaagaataccatgcagaaggaggcaaagtgcctatcaagtggatggcattggaatcaattttacacagaatctatacccaccagagtgatgtctggagctacggggtgaccgtttgggagttgatgacctttggatccaagccatatgacggaatccctgccagcgagatctcctccatcctggagaaaggagaacgcctccctcagccacccatatgtaccatcgatgtctacatgatcatggtcaagtgctggatgatagacgcagatagtcgcccaaagttccgtgagttgatcatcgaattctccaaaatggcccgagacccccagcgctaccttgtcattcagggggatgaaagaatgcatttgccaagtcctacagactccaacttctaccgtgccctgatggatgaagaagacatggacgacgtggtggatgccgacgagtacctcatcccacagcagggcttcttcagcagcccctccacgtcacggactcccctcctgagctctctgagtgcaaccagcaacaattccaccgtggcttgcattgatagaaatgggctgcaaagctgtcccatcaaggaagacagcttcttgcagcgatacagctcagaccccacaggcgccttgactgaggacagcatagacgacaccttcctcccagtgcctgaatacataaaccagtccgttcccaaaaggcccgctggctctgtgcagaatcctgtctatcacaatcagcctctgaaccccgcgcccagcagagacccacactaccaggacccccacagcactgcagtgggcaaccccgagtatctcaacactgtccagcccacctgtgtcaacagcacattcgacagccctgcccactgggcccagaaaggcagccaccaaattagcctggacaaccctgactaccagcaggacttctttcccaaggaagccaagccaaatggcatctttaagggctccacagctgaaaatgcagaatacctaagggtcgcgccacaaagcagtgaatttattggagcatga

SEQ ID NO: 329 - DNA, 3633 bp, Homo sapiens
atgcgaccctccgggacggccggggcagcgctcctggcgctgctggctgcgctctgcccggcgagtcgggctctggaggaaaagaaagtttgccaaggcacgagtaacaagctcacgcagttgggcacttttgaagatcattttctcagcctccagaggatgttcaataactgtgaggtggtccttgggaatttggaaattacctatgtgcagaggaattatgatctttccttcttaaagaccatccaggaggtggctggttatgtcctcattgccctcaacacagtggagcgaattcctttggaaaacctgcagatcatcagaggaaatatgtactacgaaaattcctatgccttagcagtcttatctaactatgatgcaaataaaaccggactgaaggagctgcccatgagaaatttacaggaaatcctgcatggcgccgtgcggttcagcaacaaccctgccctgtgcaacgtggagagcatccagtggcgggacatagtcagcagtgactttctcagcaacatgtcgatggacttccagaaccacctgggcagctgccaaaagtgtgatccaagctgtcccaatgggagctgctggggtgcaggagaggagaactgccagaaactgaccaaaatcatctgtgcccagcagtgctccgggcgctgccgtggcaagtcccccagtgactgctgccacaaccagtgtgctgcaggctgcacaggcccccgggagagcgactgcctggtctgccgcaaattccgagacgaagccacgtgcaaggacacctgccccccactcatgctctacaaccccaccacgtaccagatggatgtgaaccccgagggcaaatacagctttggtgccacctgcgtgaagaagtgtccccgtaattatgtggtgacagatcacggctcgtgcgtccgagcctgtggggccgacagctatgagatggaggaagacggcgtccgcaagtgtaagaagtgcgaagggtcttgccgcaaagtgtgtaacggaataggtattggtgaatttaaagactcactctccataaatgctacgaatattaaacacttcaaaaactgcacctccatcagtggcgatctccacatcctgccggtggcatttaggggtgactccttcacacatactcctcctctggatccacaggaactggatattctgaaaaccgtaaaggaaatcacagggtttttgctgattcaggcttggcctgaaaacaggacggacctccatgcctttgagaacctagaaatcatacgcggcaggaccaagcaacatggtcagttttctcttgcagtcgtcagcctgaacataacatccttgggattacgctccctcaaggagataagtgatggagatgtgataatttcaggaaacaaaaatttgtgctatgcaaatacaataaactggaaaaaactgtttgggacctccggtcagaaaaccaaaattataagcaacagaggtgaaaacagctgcaaggccacaggccaggtctgccatgccttgtgctcccccgagggctgctggggcccggagcccagggactgcgtctcttgccggaatgtcagccgaggcagggaatgcgtggacaagtgcaaccttctggagggtgagccaagggagtttgtggagaactctgagtgcatacagtgccacccagagtgcctgcctcaggccatgaacatcacctgcacaggacggggaccagacaactgtatccagtgtgcccactacattgacggcccccactgcgtcaagacctgcccggcaggagtcatgggagaaaacaacaccctggtctggaagtacgcagacgccggccatgtgtgccacctgtgccatccaaactgcacctacggatgcactgggccaggtcttgaaggctgtccaacgaatgggcctaagatcccgtccatcgccactgggatggtgggggccctcctcttgctgctggtggtggccctggggatcggcctcttcatgcgaaggcgccacatcgttcggaagcgcacgctgcggaggctgctgcaggagagggagcttgtggagcctcttacacccagtggagaagctcccaaccaagctctcttgaggatcttgaaggaaactgaattcaaaaagatcaaagtgctgggctccggtgcgttcggcacggtgtataagggactctggatcccagaaggtgagaaagttaaaattcccgtcgctatcaaggaattaagagaagcaacatctccgaaagccaacaaggaaatcctcgatgaagcctacgtgatggccagcgtggacaacccccacgtgtgccgcctgctgggcatctgcctcacctccaccgtgcagctcatcacgcagctcatgcccttcggctgcctcctggactatgtccgggaacacaaagacaatattggctcccagtacctgctcaactggtgtgtgcagatcgcaaagggcatgaactacttggaggaccgtcgcttggtgcaccgcgacctggcagccaggaacgtactggtgaaaacaccgcagcatgtcaagatcacagattttgggctggccaaactgctgggtgcggaagagaaagaataccatgcagaaggaggcaaagtgcctatcaagtggatggcattggaatcaattttacacagaatctatacccaccagagtgatgtctggagctacggggtgaccgtttgggagttgatgacctttggatccaagccatatgacggaatccctgccagcgagatctcctccatcctggagaaaggagaacgcctccctcagccacccatatgtaccatcgatgtctacatgatcatggtcaagtgctggatgatagacgcagatagtcgcccaaagttccgtgagttgatcatcgaattctccaaaatggcccgagacccccagcgctaccttgtcattcagggggatgaaagaatgcatttgccaagtcctacagactccaacttctaccgtgccctgatggatgaagaagacatggacgacgtggtggatgccgacgagtacctcatcccacagcagggcttcttcagcagcccctccacgtcacggactcccctcctgagctctctgagtgcaaccagcaacaattccaccgtggcttgcattgatagaaatgggctgcaaagctgtcccatcaaggaagacagcttcttgcagcgatacagctcagaccccacaggcgccttgactgaggacagcatagacgacaccttcctcccagtgcctgaatacataaaccagtccgttcccaaaaggcccgctggctctgtgcagaatcctgtctatcacaatcagcctctgaaccccgcgcccagcagagacccacactaccaggacccccacagcactgcagtgggcaaccccgagtatctcaacactgtccagcccacctgtgtcaacagcacattcgacagccctgcccactgggcccagaaaggcagccaccaaattagcctggacaaccctgactaccagcaggacttctttcccaaggaagccaagccaaatggcatctttaagggctccacagctgaaaatgcagaatacctaagggtcgcgccacaaagcagtgaatttattggagcatga

SEQ ID NO: 330 - DNA, 3633 bp, Homo sapiens
atgcgaccctccgggacggccggggcagcgctcctggcgctgctggctgcgctctgcccggcgagtcgggctctggaggaaaagaaagtttgccaaggcacgagtaacaagctcacgcagttgggcacttttgaagatcattttctcagcctccagaggatgttcaataactgtgaggtggtccttgggaatttggaaattacctatgtgcagaggaattatgatctttccttcttaaagaccatccaggaggtggctggttatgtcctcattgccctcaacacagtggagcgaattcctttggaaaacctgcagatcatcagaggaaatatgtactacgaaaattcctatgccttagcagtcttatctaactatgatgcaaataaaaccggactgaaggagctgcccatgagaaatttacaggaaatcctgcatggcgccgtgcggttcagcaacaaccctgccctgtgcaacgtggagagcatccagtggcgggacatagtcagcagtgactttctcagcaacatgtcgatggacttccagaaccacctgggcagctgccaaaagtgtgatccaagctgtcccaatgggagctgctggggtgcaggagaggagaactgccagaaactgaccaaaatcatctgtgcccagcagtgctccgggcgctgccgtggcaagtcccccagtgactgctgccacaaccagtgtgctgcaggctgcacaggcccccgggagagcgactgcctggtctgccgcaaattccgagacgaagccacgtgcaaggacacctgccccccactcatgctctacaaccccaccacgtaccagatggatgtgaaccccgagggcaaatacagctttggtgccacctgcgtgaagaagtgtccccgtaattatgtggtgacagatcacggctcgtgcgtccgagcctgtggggccgacagctatgagatggaggaagacggcgtccgcaagtgtaagaagtgcgaagggccttgccgcaaagtgtgtaacggaataggtattggtgaatttaaagactcactctccataaatgctacgaatattaaacacttcaaaaactgcacctccatcagtggcgatctccacatcctgccggtggcatttaggggtgactccttcacacatactcctcctctggatccacaggaactggatattctgaaaaccgtaaaggaaatcacagggtttttgctgattcaggcttggcctgaaaacaggacggacctccatgcctttgagaacctagaaatcatacgcggcaggaccaagcaacatggtcagttttctcttgcagtcgtcagcctgaacataacatccttgggattacgctccctcaaggagataagtgatggagatgtgataatttcaggaaacaaaaatttgtgctatgcaaatacaataaactggaaaaaactgtttgggacctccggtcagaaaaccaaaattataagcaacagaggtgaaaacagctgcaaggccacaggccaggtctgccatgccttgtgctcccccgagggctgctggggcccggagcccagggactgcgtctcttgccggaatgtcagccgaggcagggaatgcgtggacaagtgcaaccttctggagggtgagccaagggagtttgtggagaactctgagtgcatacagtgccacccagagtgcctgcctcaggccatgaacatcacctgcacaggacggggaccagacaactgtatccagtgtgcccactacattgacggcccccactgcgtcaagacctgcccggcaggagtcatgggagaaaacaacaccctggtctggaagtacgcagacgccggccatgtgtgccacctgtgccatccaaactgcacctacggatgcactgggccaggtcttgaaggctgtccaacgaatgggcctaagatcccgtccctcgccactgggatggtgggggccctcctcttgctgctggtggtggccctggggatcggcctcttcatgcgaaggcgccacatcgttcggaagcgcacgctgcggaggctgctgcaggagagggagcttgtggagcctcttacacccagtggagaagctcccaaccaagctctcttgaggatcttgaaggaaactgaattcaaaaagatcaaagtgctgggctccggtgcgttcggcacggtgtataagggactctggatcccagaaggtgagaaagttaaaattcccgtcgctatcaaggaattaagagaagcaacatctccgaaagccaacaaggaaatcctcgatgaagcctacgtgatggccagcgtggacaacccccacgtgtgccgcctgctgggcatctgcctcacctccaccgtgcagctcatcacgcagctcatgcccttcggctgcctcctggactatgtccgggaacacaaagacaatattggctcccagtacctgctcaactggtgtgtgcagatcgcaaagggcatgaactacttggaggaccgtcgcttggtgcaccgcgacctggcagccaggaacgtactggtgaaaacaccgcagcatgtcaagatcacagattttgggctggccaaactgctgggtgcggaagagaaagaataccatgcagaaggaggcaaagtgcctatcaagtggatggcattggaatcaattttacacagaatctatacccaccagagtgatgtctggagctacggggtgaccgtttgggagttgatgacctttggatccaagccatatgacggaatccctgccagcgagatctcctccatcctggagaaaggagaacgcctccctcagccacccatatgtaccatcgatgtctacatgatcatggtcaagtgctggatgatagacgcagatagtcgcccaaagttccgtgagttgatcatcgaattctccaaaatggcccgagacccccagcgctaccttgtcattcagggggatgaaagaatgcatttgccaagtcctacagactccaacttctaccgtgccctgatggatgaagaagacatggacgacgtggtggatgccgacgagtacctcatcccacagcagggcttcttcagcagcccctccacgtcacggactcccctcctgagctctctgagtgcaaccagcaacaattccaccgtggcttgcattgatagaaatgggctgcaaagctgtcccatcaaggaagacagcttcttgcagcgatacagctcagaccccacaggcgccttgactgaggacagcatagacgacaccttcctcccagtgcctgaatacataaaccagtccgttcccaaaaggcccgctggctctgtgcagaatcctgtctatcacaatcagcctctgaaccccgcgcccagcagagacccacactaccaggacccccacagcactgcagtgggcaaccccgagtatctcaacactgtccagcccacctgtgtcaacagcacattcgacagccctgcccactgggcccagaaaggcagccaccaaattagcctggacaaccctgactaccagcaggacttctttcccaaggaagccaagccaaatggcatctttaagggctccacagctgaaaatgcagaatacctaagggtcgcgccacaaagcagtgaatttattggagcatga

SEQ ID NO: 331 - DNA, 3633 bp, Homo sapiens
atgcgaccctccgggacggccggggcagcgctcctggcgctgctggctgcgctctgcccggcgagtcgggctctggaggaaaagaaagtttgccaaggcacgagtaacaagctcacgcagttgggcacttttgaagatcattttctcagcctccagaggatgttcaataactgtgaggtggtccttgggaatttggaaattacctatgtgcagaggaattatgatctttccttcttaaagaccatccaggaggtggctggttatgtcctcattgccctcaacacagtggagcgaattcctttggaaaacctgcagatcatcagaggaaatatgtactacgaaaattcctatgccttagcagtcttatctaactatgatgcaaataaaaccggactgaaggagctgcccatgagaaatttacaggaaatcctgcatggcgccgtgcggttcagcaacaaccctgccctgtgcaacgtggagagcatccagtggcgggacatagtcagcagtgactttctcagcaacatgtcgatggacttccagaaccacctgggcagctgccaaaagtgtgatccaagctgtcccaatgggagctgctggggtgcaggagaggagaactgccagaaactgaccaaaatcatctgtgcccagcagtgctccgggcgctgccgtggcaagtcccccagtgactgctgccacaaccagtgtgctgcaggctgcacaggcccccgggagagcgactgcctggtctgccgcaaattccgagacgaagccacgtgcaaggacacctgccccccactcatgctctacaaccccaccacgtaccagatggatgtgaaccccgagggcaaatacagctttggtgccacctgcgtgaagaagtgtccccgtaattatgtggtgacagatcacggctcgtgcgtccgagcctgtggggccgacagctatgagatggaggaagacggcgtccgcaagtgtaagaagtgcgaagggccttgccgcaaagtgtgtaacggaataggtattggtgaatttaaagactcactctccataaatgctacgaatattaaacacttcaaaaactgcacctccatcagtggcgatctccacatcctgccggtggcatttaggggtgactccttcacacatactcctcctctggatccacaggaactggatattctgaaaaccgtaaaggaaatcacagggtttttgctgattcaggcttggcctgaaaacaggacggacctccatgcctttgagaacctagaaatcatacgcggcaggaccaagcaacatggtcagttttctcttgcagtcgtcagcctgaacataacatccttgggattacgctccctcaaggagataagtgatggagatgtgataatttcaggaaacaaaaatttgtgctatgcaaatacaataaactggaaaaaactgtttgggacctccggtcagaaaaccaaaattataagcaacagaggtgaaaacagctgcaaggccacaggccaggtctgccatgccttgtgctcccccgagggctgctggggcccggagcccagggactgcgtctcttgccggaatgtcagccgaggcagggaatgcgtggacaagtgcaaccttctggagggtgagccaagggagtttgtggagaactctgagtgcatacagtgccacccagagtgcctgcctcaggccatgaacatcacctgcacaggacggggaccagacaactgtatccagtgtgcccactacattgacggcccccactgcgtcaagacctgcccggcaggagtcatgggagaaaacaacaccctggtctggaagtacgcagacgccggccatgtgtgccacctgtgccatccaaactgcacctacggatgcactgggccaggtcttgaaggctgtccaacgaatgggcctaagatcccgtccatcgccactgggatggtgggggccctcctcttgctgctggtggtggccctggggatcggcctcttcatgcgaaggcgccacatcgttcggaagcgcatgctgcggaggctgctgcaggagagggagcttgtggagcctcttacacccagtggagaagctcccaaccaagctctcttgaggatcttgaaggaaactgaattcaaaaagatcaaagtgctgggctccggtgcgttcggcacggtgtataagggactctggatcccagaaggtgagaaagttaaaattcccgtcgctatcaaggaattaagagaagcaacatctccgaaagccaacaaggaaatcctcgatgaagcctacgtgatggccagcgtggacaacccccacgtgtgccgcctgctgggcatctgcctcacctccaccgtgcagctcatcacgcagctcatgcccttcggctgcctcctggactatgtccgggaacacaaagacaatattggctcccagtacctgctcaactggtgtgtgcagatcgcaaagggcatgaactacttggaggaccgtcgcttggtgcaccgcgacctggcagccaggaacgtactggtgaaaacaccgcagcatgtcaagatcacagattttgggctggccaaactgctgggtgcggaagagaaagaataccatgcagaaggaggcaaagtgcctatcaagtggatggcattggaatcaattttacacagaatctatacccaccagagtgatgtctggagctacggggtgaccgtttgggagttgatgacctttggatccaagccatatgacggaatccctgccagcgagatctcctccatcctggagaaaggagaacgcctccctcagccacccatatgtaccatcgatgtctacatgatcatggtcaagtgctggatgatagacgcagatagtcgcccaaagttccgtgagttgatcatcgaattctccaaaatggcccgagacccccagcgctaccttgtcattcagggggatgaaagaatgcatttgccaagtcctacagactccaacttctaccgtgccctgatggatgaagaagacatggacgacgtggtggatgccgacgagtacctcatcccacagcagggcttcttcagcagcccctccacgtcacggactcccctcctgagctctctgagtgcaaccagcaacaattccaccgtggcttgcattgatagaaatgggctgcaaagctgtcccatcaaggaagacagcttcttgcagcgatacagctcagaccccacaggcgccttgactgaggacagcatagacgacaccttcctcccagtgcctgaatacataaaccagtccgttcccaaaaggcccgctggctctgtgcagaatcctgtctatcacaatcagcctctgaaccccgcgcccagcagagacccacactaccaggacccccacagcactgcagtgggcaaccccgagtatctcaacactgtccagcccacctgtgtcaacagcacattcgacagccctgcccactgggcccagaaaggcagccaccaaattagcctggacaaccctgactaccagcaggacttctttcccaaggaagccaagccaaatggcatctttaagggctccacagctgaaaatgcagaatacctaagggtcgcgccacaaagcagtgaatttattggagcatga

SEQ ID NO: 332 - DNA, 3633 bp, Homo sapiens
atgcgaccctccgggacggccggggcagcgctcctggcgctgctggctgcgctctgcccggcgagtcgggctctggaggaaaagaaagtttgccaaggcacgagtaacaagctcacgcagttgggcacttttgaagatcattttctcagcctccagaggatgttcaataactgtgaggtggtccttgggaatttggaaattacctatgtgcagaggaattatgatctttccttcttaaagaccatccaggaggtggctggttatgtcctcattgccctcaacacagtggagcgaattcctttggaaaacctgcagatcatcagaggaaatatgtactacgaaaattcctatgccttagcagtcttatctaactatgatgcaaataaaaccggactgaaggagctgcccatgagaaatttacaggaaatcctgcatggcgccgtgcggttcagcaacaaccctgccctgtgcaacgtggagagcatccagtggcgggacatagtcagcagtgactttctcagcaacatgtcgatggacttccagaaccacctgggcagctgccaaaagtgtgatccaagctgtcccaatgggagctgctggggtgcaggagaggagaactgccagaaactgaccaaaatcatctgtgcccagcagtgctccgggcgctgccgtggcaagtcccccagtgactgctgccacaaccagtgtgctgcaggctgcacaggcccccgggagagcgactgcctggtctgccgcaaattccgagacgaagccacgtgcaaggacacctgccccccactcatgctctacaaccccaccacgtaccagatggatgtgaaccccgagggcaaatacagctttggtgccacctgcgtgaagaagtgtccccgtaattatgtggtgacagatcacggctcgtgcgtccgagcctgtggggccgacagctatgagatggaggaagacggcgtccgcaagtgtaagaagtgcgaagggccttgccgcaaagtgtgtaacggaataggtattggtgaatttaaagactcactctccataaatgctacgaatattaaacacttcaaaaactgcacctccatcagtggcgatctccacatcctgccggtggcatttaggggtgactccttcacacatactcctcctctggatccacaggaactggatattctgaaaaccgtaaaggaaatcacagggtttttgctgattcaggcttggcctgaaaacaggacggacctccatgcctttgagaacctagaaatcatacgcggcaggaccaagcaacatggtcagttttctcttgcagtcgtcagcctgaacataacatccttgggattacgctccctcaaggagataagtgatggagatgtgataatttcaggaaacaaaaatttgtgctatgcaaatacaataaactggaaaaaactgtttgggacctccggtcagaaaaccaaaattataagcaacagaggtgaaaacagctgcaaggccacaggccaggtctgccatgccttgtgctcccccgagggctgctggggcccggagcccagggactgcgtctcttgccggaatgtcagccgaggcagggaatgcgtggacaagtgcaaccttctggagggtgagccaagggagtttgtggagaactctgagtgcatacagtgccacccagagtgcctgcctcaggccatgaacatcacctgcacaggacggggaccagacaactgtatccagtgtgcccactacattgacggcccccactgcgtcaagacctgcccggcaggagtcatgggagaaaacaacaccctggtctggaagtacgcagacgccggccatgtgtgccacctgtgccatccaaactgcacctacggatgcactgggccaggtcttgaaggctgtccaacgaatgggcctaagatcccgtccatcgccactgggatggtgggggccctcctcttgctgctggtggtggccctggggatcggcctcttcatgcgaaggcgccacatcgttcggaagcgcacgctgcggaggctgctgcaggagagggagcttgtggagcctcttacacccagtggagaagctcccaaccaagctctcttgaggatcttgaaggaaactgaattcaaaaagatcaaagtgctgggctccggtgcgttcggcacggtgtataagggactctggatcccagaaggtgagaaagttaaaattcccgtcgctatcaaggaattaagagaagcaacatcttcgaaagccaacaaggaaatcctcgatgaagcctacgtgatggccagcgtggacaacccccacgtgtgccgcctgctgggcatctgcctcacctccaccgtgcagctcatcacgcagctcatgcccttcggctgcctcctggactatgtccgggaacacaaagacaatattggctcccagtacctgctcaactggtgtgtgcagatcgcaaagggcatgaactacttggaggaccgtcgcttggtgcaccgcgacctggcagccaggaacgtactggtgaaaacaccgcagcatgtcaagatcacagattttgggctggccaaactgctgggtgcggaagagaaagaataccatgcagaaggaggcaaagtgcctatcaagtggatggcattggaatcaattttacacagaatctatacccaccagagtgatgtctggagctacggggtgaccgtttgggagttgatgacctttggatccaagccatatgacggaatccctgccagcgagatctcctccatcctggagaaaggagaacgcctccctcagccacccatatgtaccatcgatgtctacatgatcatggtcaagtgctggatgatagacgcagatagtcgcccaaagttccgtgagttgatcatcgaattctccaaaatggcccgagacccccagcgctaccttgtcattcagggggatgaaagaatgcatttgccaagtcctacagactccaacttctaccgtgccctgatggatgaagaagacatggacgacgtggtggatgccgacgagtacctcatcccacagcagggcttcttcagcagcccctccacgtcacggactcccctcctgagctctctgagtgcaaccagcaacaattccaccgtggcttgcattgatagaaatgggctgcaaagctgtcccatcaaggaagacagcttcttgcagcgatacagctcagaccccacaggcgccttgactgaggacagcatagacgacaccttcctcccagtgcctgaatacataaaccagtccgttcccaaaaggcccgctggctctgtgcagaatcctgtctatcacaatcagcctctgaaccccgcgcccagcagagacccacactaccaggacccccacagcactgcagtgggcaaccccgagtatctcaacactgtccagcccacctgtgtcaacagcacattcgacagccctgcccactgggcccagaaaggcagccaccaaattagcctggacaaccctgactaccagcaggacttctttcccaaggaagccaagccaaatggcatctttaagggctccacagctgaaaatgcagaatacctaagggtcgcgccacaaagcagtgaatttattggagcatga

SEQ ID NO: 333 - DNA, 3633 bp, Homo sapiens
atgcgaccctccgggacggccggggcagcgctcctggcgctgctggctgcgctctgcccggcgagtcgggctctggaggaaaagaaagtttgccaaggcacgagtaacaagctcacgcagttgggcacttttgaagatcattttctcagcctccagaggatgttcaataactgtgaggtggtccttgggaatttggaaattacctatgtgcagaggaattatgatctttccttcttaaagaccatccaggaggtggctggttatgtcctcattgccctcaacacagtggagcgaattcctttggaaaacctgcagatcatcagaggaaatatgtactacgaaaattcctatgccttagcagtcttatctaactatgatgcaaataaaaccggactgaaggagctgcccatgagaaatttacaggaaatcctgcatggcgccgtgcggttcagcaacaaccctgccctgtgcaacgtggagagcatccagtggcgggacatagtcagcagtgactttctcagcaacatgtcgatggacttccagaaccacctgggcagctgccaaaagtgtgatccaagctgtcccaatgggagctgctggggtgcaggagaggagaactgccagaaactgaccaaaatcatctgtgcccagcagtgctccgggcgctgccgtggcaagtcccccagtgactgctgccacaaccagtgtgctgcaggctgcacaggcccccgggagagcgactgcctggtctgccgcaaattccgagacgaagccacgtgcaaggacacctgccccccactcatgctctacaaccccaccacgtaccagatggatgtgaaccccgagggcaaatacagctttggtgccacctgcgtgaagaagtgtccccgtaattatgtggtgacagatcacggctcgtgcgtccgagcctgtggggccgacagctatgagatggaggaagacggcgtccgcaagtgtaagaagtgcgaagggccttgccgcaaagtgtgtaacggaataggtattggtgaatttaaagactcactctccataaatgctacgaatattaaacacttcaaaaactgcacctccatcagtggcgatctccacatcctgccggtggcatttaggggtgactccttcacacatactcctcctctggatccacaggaactggatattctgaaaaccgtaaaggaaatcacagggtttttgctgattcaggcttggcctgaaaacaggacggacctccatgcctttgagaacctagaaatcatacgcggcaggaccaagcaacatggtcagttttctcttgcagtcgtcagcctgaacataacatccttgggattacgctccctcaaggagataagtgatggagatgtgataatttcaggaaacaaaaatttgtgctatgcaaatacaataaactggaaaaaactgtttgggacctccggtcagaaaaccaaaattataagcaacagaggtgaaaacagctgcaaggccacaggccaggtctgccatgccttgtgctcccccgagggctgctggggcccggagcccagggactgcgtctcttgccggaatgtcagccgaggcagggaatgcgtggacaagtgcaaccttctggagggtgagccaagggagtttgtggagaactctgagtgcatacagtgccacccagagtgcctgcctcaggccatgaacatcacctgcacaggacggggaccagacaactgtatccagtgtgcccactacattgacggcccccactgcgtcaagacctgcccggcaggagtcatgggagaaaacaacaccctggtctggaagtacgcagacgccggccatgtgtgccacctgtgccatccaaactgcacctacggatgcactgggccaggtcttgaaggctgtccaacgaatgggcctaagatcccgtccatcgccactgggatggtgggggccctcctcttgctgctggtggtggccctggggatcggcctcttcatgcgaaggcgccacatcgttcggaagcgcacgctgcggaggctgctgcaggagagggagcttgtggagcctcttacacccagtggagaagctcccaaccaagctctcttgaggatcttgaaggaaactgaattcaaaaagatcaaagtgctgggctccggtgcgttcggcacggtgtataagggactctggatcccagaaggtgagaaagttaaaattcccgtcgctatcaaggaattaagagaagcaacatctccgaaagccaacaaggaaatcctcgatgaagcctacgtgatggccagcgtggacaacccccacgtgtgccgcctgctgggcatctgcctcacctccaccgtgcagctcatcacgcagctcatgcccttcggctgcctcctggactatgtccgggaacacaaagacaatattggctcccagtacctgctcaactggtgtgtgcagatcgcaaagggcatgaactacttggaggaccgtcgcttggtgcaccgcgacctggcagccaggaacgtactggtgaaaacaccgcagcatgtcaagatcacagattttgggctggccaaactgctgggtgcggaagagaaagaataccatgcagaaggaggcaaagtgcctatcaagtggatggcattggaatcaattttacacagaatctatacccaccagagtgatgtctggagctacggggtgaccgtttgggagttgatgacctttggatccaagccatatgacggaatccctgccagcaagatctcctccatcctggagaaaggagaacgcctccctcagccacccatatgtaccatcgatgtctacatgatcatggtcaagtgctggatgatagacgcagatagtcgcccaaagttccgtgagttgatcatcgaattctccaaaatggcccgagacccccagcgctaccttgtcattcagggggatgaaagaatgcatttgccaagtcctacagactccaacttctaccgtgccctgatggatgaagaagacatggacgacgtggtggatgccgacgagtacctcatcccacagcagggcttcttcagcagcccctccacgtcacggactcccctcctgagctctctgagtgcaaccagcaacaattccaccgtggcttgcattgatagaaatgggctgcaaagctgtcccatcaaggaagacagcttcttgcagcgatacagctcagaccccacaggcgccttgactgaggacagcatagacgacaccttcctcccagtgcctgaatacataaaccagtccgttcccaaaaggcccgctggctctgtgcagaatcctgtctatcacaatcagcctctgaaccccgcgcccagcagagacccacactaccaggacccccacagcactgcagtgggcaaccccgagtatctcaacactgtccagcccacctgtgtcaacagcacattcgacagccctgcccactgggcccagaaaggcagccaccaaattagcctggacaaccctgactaccagcaggacttctttcccaaggaagccaagccaaatggcatctttaagggctccacagctgaaaatgcagaatacctaagggtcgcgccacaaagcagtgaatttattggagcatga

SEQ ID NO: 334 - DNA, 3633 bp, Homo sapiens
atgcgaccctccgggacggccggggcagcgctcctggcgctgctggctgcgctctgcccggcgagtcgggctctggaggaaaagaaagtttgccaaggcacgagtaacaagctcacgcagttgggcacttttgaagatcattttctcagcctccagaggatgttcaataactgtgaggtggtccttgggaatttggaaattacctatgtgcagaggaattatgatctttccttcttaaagaccatccaggaggtggctggttatgtcctcattgccctcaacacagtggagcgaattcctttggaaaacctgcagatcatcagaggaaatatgtactacgaaaattcctatgccttagcagtcttatctaactatgatgcaaataaaaccggactgaaggagctgcccatgagaaatttacaggaaatcctgcatggcgccgtgcggttcagcaacaaccctgccctgtgcaacgtggagagcatccagtggcgggacatagtcagcagtgactttctcagcaacatgtcgatggacttccagaaccacctgggcagctgccaaaagtgtgatccaagctgtcccaatgggagctgctggggtgcaggagaggagaactgccagaaactgaccaaaatcatctgtgcccagcagtgctccgggcgctgccgtggcaagtcccccagtgactgctgccacaaccagtgtgctgcaggctgcacaggcccccgggagagcgactgcctggtctgccgcaaattccgagacgaagccacgtgcaaggacacctgccccccactcatgctctacaaccccaccacgtaccagatggatgtgaaccccgagggcaaatacagctttggtgccacctgcgtgaagaagtgtccccgtaattatgtggtgacagatcacggctcgtgcgtccgagcctgtggggccgacagctatgagatggaggaagacggcgtccgcaagtgtaagaagtgcgaagggccttgccgcaaagtgtgtaacggaataggtattggtgaatttaaagactcactctccataaatgctacgaatattaaacacttcaaaaactgcacctccatcagtggcgatctccacatcctgccggtggcatttaggggtgactccttcacacatactcctcctctggatccacaggaactggatattctgaaaaccgtaaaggaaatcacagggtttttgctgattcaggcttggcctgaaaacaggacggacctccatgcctttgagaacctagaaatcatacgcggcaggaccaagcaacatggtcagttttctcttgcagtcgtcagcctgaacataacatccttgggattacgctccctcaaggagataagtgatggagatgtgataatttcaggaaacaaaaatttgtgctatgcaaatacaataaactggaaaaaactgtttgggacctccggtcagaaaaccaaaattataagcaacagaggtgaaaacagctgcaaggccacaggccaggtctgccatgccttgtgctcccccgagggctgctggggcccggagcccagggactgcgtctcttgccggaatgtcagccgaggcagggaatgcgtggacaagtgcaaccttctggagggtgagccaagggagtttgtggagaactctgagtgcatacagtgccacccagagtgcctgcctcaggccatgaacatcacctgcacaggacggggaccagacaactgtatccagtgtgcccactacattgacggcccccactgcgtcaagacctgcccggcaggagtcatgggagaaaacaacaccctggtctggaagtacgcagacgccggccatgtgtgccacctgtgccatccaaactgcacctacggatgcactgggccaggtcttgaaggctgtccaacgaatgggcctaagatcccgtccatcgccactgggatggtgggggccctcctcttgctgctggtggtggccctggggatcggcctcttcatgcgaaggcgccacatcgttcggaagcgcacgctgcggaggctgctgcaggagagggagcttgtggagcctcttacacccagtggagaagctcccaaccaagctctcttgaggatcttgaaggaaactgaattcaaaaagatcaaagtgctgggctccggtgcgttcggcacggtgtataagggactctggatcccagaaggtgagaaagttaaaattcccgtcgctatcaaggaattaagagaagcaacatctccgaaagccaacaaggaaatcctcgatgaagcctacgtgatggccagcgtggacaacccccacgtgtgccgcctgctgggcatctgcctcacctccaccgtgcagctcatcacgcagctcatgcccttcggctgcctcctggactatgtccgggaacacaaagacaatattggctcccagtacctgctcaactggtgtgtgcagatcgcaaagggcatgaactacttggaggaccgtcgcttggtgcaccgcgacctggcagccaggaacgtactggtgaaaacaccgcagcatgtcaagatcacagattttgggctggccaaactgctgggtgcggaagagaaagaataccatgcagaaggaggcaaagtgcctatcaagtggatggcattggaatcaattttacacagaatctatacccaccagagtgatgtctggagctacggggtgaccgtttgggagttgatgacctttggatccaagccatatgacggaatccctgccagcgagatctcctccatcctggagaaaggagaacgcctccctcagccacccatatgtaccatcgatgtctacatgatcatggtcaagtgctggatgatagacgcagatagtcgcccaaagttccgtgagttgatcatcgaattctccaaaatggcccgagacccccagcgctaccttgtcattcagggggatgaaagaatgcatttgccaagtcctacagactccaacttctaccgtgccctgatggatgaagaagacatggacgacgtggtggatgccgacgagtacctcatcccacagcagggcttcttcagcagcccctccacgtcacggactcccctcctgagctctctgagtgcaaccagcaacaattccaccgtggcttgcattgatagaaatgggctgcaaagctgtcccatcaaggaagacagcttcttgcagcgatacagctcagaccccacaggcgccttgactgaggacagcatagacgacaccttcctcccagtgcctgaatacataaaccagtccgttcccaaaaggcccgctggctctgtgcagaatcctgtctatcacaatcagcctctgaaccccacgcccagcagagacccacactaccaggacccccacagcactgcagtgggcaaccccgagtatctcaacactgtccagcccacctgtgtcaacagcacattcgacagccctgcccactgggcccagaaaggcagccaccaaattagcctggacaaccctgactaccagcaggacttctttcccaaggaagccaagccaaatggcatctttaagggctccacagctgaaaatgcagaatacctaagggtcgcgccacaaagcagtgaatttattggagcatga

SEQ ID NO: 335 - DNA, 2931 bp, Homo sapiens
atggagctccaggcagcccgcgcctgcttcgccctgctgtggggctgtgcgctggccgcggccgcggcggcgcagggcaaggaagtggtactgctggactttgctgcagctggaggggagctcggctggctcacacacccgtatggcaaagggtgggacctgatgcagaacatcatgaatgacatgccgatctacatgtactccgtgtgcaacgtgatgtctggcgaccaggacaactggctccgcaccaactgggtgtaccgaggagaggctgagcgtatcttcattgagctcaagtttactgtacgtgactgcaacagcttccctggtggcgccagctcctgcaaggagactttcaacctctactatgccgagtcggacctggactacggcaccaacttccagaagcgcctgttcaccaagattgacaccattgcgcccgatgagatcaccgtcagcagcgacttcgaggcacgccacgtgaagctgaacgtggaggagcgctccgtggggccgctcacccgcaaaggcttctacctggccttccaggatatcggtgcctgtgtggcgctgctctccgtccgtgtctactacaagaagtgccccgagctgctgcagggcctggcccacttccctgagaccatcgccggctctgatgcaccttccctggccactgtggccggcacctgtgtggaccatgccgtggtgccaccggggggtgaagagccccgtatgcactgtgcagtggatggcgagtggctggtgcccattgggcagtgcctgtgccaggcaggctacgagaaggtggaggatgcctgccaggcctgctcgcctggattttttaagtttgaggcatctgagagcccctgcttggagtgccctgagcacacgctgccatcccctgagggtgccacctcctgcgagtgtgaggaaggcttcttccaggcacctcaggacccagcgtcgatgccttgcacacgacccccctccgccccacactacctcacagccgtgggcatgggtgccaaggtggagctgcgctggacgccccctcaggacagcgggggccgcgaggacattgtctacagcgtcacctgcgaacagtgctggcccgagtctggggaatgcgggccgtgtgaggccagtgtgcgctactcggagcctcctcacggactgacccgcaccagtgtgacagtgagcgacctggagccccacatgaactacaccttcaccgtggaggcccgcaatggcgtctcaggcctggtaaccagccgcagcttccgtactgccagtgtcagcatcaaccagacagagccccccaaggtgaggctggagggccgcagcaccacctcgcttagcgtctcctggagcatccccccgccgcagcagagccgagtgtggaagtacgaggtcacttaccgcaagaagggagactccaacagctacaatgtgcgccgcaccgagggtttctccgtgaccctggacgacctggccccagacaccacctacctggtccaggtgcaggcactgacgcaggagggccagggggccggcagcaaggtgcacgaattccagacgctgtccccggagggatctggcaacttggcggtgattggcggcgtggctgtcggtgtggtcctgcttctggtgctggcaggagttggcttctttatccaccgcaggaggaagaaccagcgtgcccgccagtccccggaggacgtttacttctccaagtcagaacaactgaagcccctgaagacatacgtggacccccacacatatgaggaccccaaccaggctgtgttgaagttcactaccgagatccatccatcctgtgtcactcggcagaaggtgatcggagcaggagagtttggggaggtgtacaagggcatgctgaagacatcctcggggaagaaggaggtgccggtggccatcaagacgctgaaagccggctacacagagaagcagcgagtggacttcctcggcgaggccggcatcatgggccagttcagccaccacaacatcatccgcctagagggcgtcatctccaaatacaagcccatgatgatcatcactgagtacatggagaatggggccctggacaagttccttcgggagaaggatggcgagttcagcgtgctgcagctggtgggcatgctgcggggcatcgcagctggcatgaagtacctggccaacatgaactatgtgcaccgtgacctggctgcccgcaacatcctcgtcaacagcaacctggtctgcaaggtgtctgactttggcctgtcccgcgtgctggaggacgaccccgaggccacctacaccaccagtggcggcaagatccccatccgctggaccgccccggaggccatttcctaccggaagttcacctctgccagcgacgtgtggagctttggcattgtcatgtgggaggtgatgacctatggcgagcggccctactgggagttgtccaaccacgaggtgatgaaagccatcaatgatggcttccggctccccacacccatggactgcccctccgccatctaccagctcatgatgcagtgctggcagcaggagcgtgcccgccgccccaagttcgctgacatcgtcagcatcctggacaagctcattcgtgcccctgactccctcaagaccctggctgactttgacccccgcgtgtctatccggctccccagcacgagcggctcggagggggtgcccttccgcacggtgtccgagtggctggagtccatcaagatgcagcagtatacggagcacttcatggcggccggctacactgccatcgagaaggtggtgcagatgaccaacgacgacatcaagaggattggggtgcggctgcccggccaccagaagcgcatcgcctacagcctgctgggactcaaggaccaggtgaacactgtggggatccccatctga

SEQ ID NO: 336 - DNA, 2931 bp, Homo sapiens
atggagctccaggcagcccgcgcctgcttcgccctgctgtggggctgtgcgctggccgcggccgcggcggcgcagggcaaggaagtggtactgctggactttgctgcagctggaggggagctcggctggctcacacacccgtatggcaaagggtgggacctgatgcagaacatcatgaatgacatgccgatctacatgtactccgtgtgcaacgtgatgtctggcgaccaggacaactggctccgcaccaactgggtgtaccgaggagaggctgagcgtatcttcattgagctcaagtttactgtacgtgactgcaacagcttccctggtggcgccagctcctgcaaggagactttcaacctctactatgccgagtcggacctggactacggcaccaacttccagaagcgcctgttcaccaagattgacaccattgcgcccgatgagatcaccgtcagcagcgacttcgaggcacgccacgtgaagctgaacgtggaggagcgctccgtggggccgctcacccgcaaaggcttctacctggccttccaggatatcggtgcctgtgtggcgctgctctccgtccgtgtctactacaagaagtgccccgagctgctgcagggcctggcccacttccctgagaccatcgccggctctgatgcaccttccctggccactgtggccggcacctgtgtggaccatgccgtggtgccaccggggggtgaagagccccgtatgcactgtgcagtggatggcgagtggctggtgcccattgggcagtgcctgtgccaggcaggctacgagaaggtggaggatgcctgccaggcctgctcgcctggattttttaagtttgaggcatctgagagcccctgcttggagtgccctgagcacacgctgccatcccctgagggtgccacctcctgcgagtgtgaggaaggcttcttccgggcacctcaggacccagcgtcgatgccttgcacacgacccccctccgccccacgctacctcacagccgtgggcatgggtgccaaggtggagctgcgctggacgccccctcaggacagcgggggccgcgaggacattgtctacagcgtcacctgcgaacagtgctggcccgagtctggggaatgcgggccgtgtgaggccagtgtgcgctactcggagcctcctcacggactgacccgcaccagtgtgacagtgagcgacctggagccccacatgaactacaccttcaccgtggaggcccgcaatggcgtctcaggcctggtaaccagccgcagcttccgtactgccagtgtcagcatcaaccagacagagccccccaaggtgaggctggagggccgcagcaccacctcgcttagcgtctcctggagcatccccccgccgcagcagagccgagtgtggaagtacgaggtcacttaccgcaagaagggagactccaacagctacaatgtgcgccgcaccgagggtttctccgtgaccctggacgacctggccccagacaccacctacctggtccaggtgcaggcactgacgcaggagggccagggggccggcagcaaggtgcacgaattccagacgctgtccccggagggatctggcaacttggcggtgattggcggcgtggctgtcggtgtggtcctgcttctggtgctggcaggagttggcttctttatccaccgcaggaggaagaaccagcgtgcccgccagtccccggaggacgtttacttctccaagtcagaacaactgaagcccctgaagacatacgtggacccccacacatatgaggaccccaaccaggctgtgttgaagttcactaccgagatccatccatcctgtgtcactcggcagaaggtgatcggagcaggagagtttggggaggtgtacaagggcatgctgaagacatcctcggggaagaaggaggtgccggtggccatcaagacgctgaaagccggctacacagagaagcagcgagtggacttcctcggcgaggccggcatcatgggccagttcagccaccacaacatcatccgcctagagggcgtcatctccaaatacaagcccatgatgatcatcactgagtacatggagaatggggccctggacaagttccttcgggagaaggatggcgagttcagcgtgctgcagctggtgggcatgctgcggggcatcgcagctggcatgaagtacctggccaacatgaactatgtgcaccgtgacctggctgcccgcaacatcctcgtcaacagcaacctggtctgcaaggtgtctgactttggcctgtcccgcgtgctggaggacgaccccgaggccacctacaccaccagtggcggcaagatccccatccgctggaccgccccggaggccatttcctaccggaagttcacctctgccagcgacgtgtggagctttggcattgtcatgtgggaggtgatgacctatggcgagcggccctactgggagttgtccaaccacgaggtgatgaaagccatcaatgatggcttccggctccccacacccatggactgcccctccgccatctaccagctcatgatgcagtgctggcagcaggagcgtgcccgccgccccaagttcgctgacatcgtcagcatcctggacaagctcattcgtgcccctgactccctcaagaccctggctgactttgacccccgcgtgtctatccggctccccagcacgagcggctcggagggggtgcccttccgcacggtgtccgagtggctggagtccatcaagatgcagcagtatacggagcacttcatggcggccggctacactgccatcgagaaggtggtgcagatgaccaacgacgacatcaagaggattggggtgcggctgcccggccaccagaagcgcatcgcctacagcctgctgggactcaaggaccaggtgaacactgtggggatccccatctga

SEQ ID NO: 337 - DNA, 2931 bp, Homo sapiens
atggagctccaggcagcccgcgcctgcttcgccctgctgtggggctgtgcgctggccgcggccgcggcggcgcagggcaaggaagtggtactgctggactttgctgcagctggaggggagctcggctggctcacacacccgtatggcaaagggtgggacctgatgcagaacatcatgaatgacatgccgatctacatgtactccgtgtgcaacgtgatgtctggcgaccaggacaactggctccgcaccaactgggtgtaccgaggagaggctgagcgtatcttcattgagctcaagtttactgtacgtgactgcaacagcttccctggtggcgccagctcctgcaaggagactttcaacctctactatgccgagtcggacctggactacggcaccaacttccagaagcgcctgttcaccaagattgacaccattgcgcccgatgagatcaccgtcagcagcgacttcgaggcacgccacgtgaagctgaacgtggaggagcgctccgtggggccgctcacccgcaaaggcttctacctggccttccaggatatcggtgcctgtgtggcgctgctctccgtccgtgtctactacaagaagtgccccgagctgctgcagggcctggcccacttccctgagaccatcgccggctctgatgcaccttccctggccactgtggccggcacctgtgtggaccatgccgtggtgccaccggggggtgaagagccccgtatgcactgtgcagtggatggcgagtggctggtgcccattgggcagtgcctgtgccaggcaggctacgagaaggtggaggatgcctgccaggcctgctcgcctggattttttaagtttgaggcatctgagagcccctgcttggagtgccctgagcacacgctgccatcccctgagggtgccacctcctgcgagtgtgaggaaggcttcttccgggcacctcaggacccagcgtcgatgccttgcacacgacccccctccgccccacactacctcacagccgtgggcatgggtgccaaggtggagctgcgctggacgccccctcaggacagcgggggccgcgaggacattgtctacagcgtcacctgcgaacagtgctggcccgagtctggggaatgcgggccgtgtgaggccagtgtgcgctactcggagcctcctcacagactgacccgcaccagtgtgacagtgagcgacctggagccccacatgaactacaccttcaccgtggaggcccgcaatggcgtctcaggcctggtaaccagccgcagcttccgtactgccagtgtcagcatcaaccagacagagccccccaaggtgaggctggagggccgcagcaccacctcgcttagcgtctcctggagcatccccccgccgcagcagagccgagtgtggaagtacgaggtcacttaccgcaagaagggagactccaacagctacaatgtgcgccgcaccgagggtttctccgtgaccctggacgacctggccccagacaccacctacctggtccaggtgcaggcactgacgcaggagggccagggggccggcagcaaggtgcacgaattccagacgctgtccccggagggatctggcaacttggcggtgattggcggcgtggctgtcggtgtggtcctgcttctggtgctggcaggagttggcttctttatccaccgcaggaggaagaaccagcgtgcccgccagtccccggaggacgtttacttctccaagtcagaacaactgaagcccctgaagacatacgtggacccccacacatatgaggaccccaaccaggctgtgttgaagttcactaccgagatccatccatcctgtgtcactcggcagaaggtgatcggagcaggagagtttggggaggtgtacaagggcatgctgaagacatcctcggggaagaaggaggtgccggtggccatcaagacgctgaaagccggctacacagagaagcagcgagtggacttcctcggcgaggccggcatcatgggccagttcagccaccacaacatcatccgcctagagggcgtcatctccaaatacaagcccatgatgatcatcactgagtacatggagaatggggccctggacaagttccttcgggagaaggatggcgagttcagcgtgctgcagctggtgggcatgctgcggggcatcgcagctggcatgaagtacctggccaacatgaactatgtgcaccgtgacctggctgcccgcaacatcctcgtcaacagcaacctggtctgcaaggtgtctgactttggcctgtcccgcgtgctggaggacgaccccgaggccacctacaccaccagtggcggcaagatccccatccgctggaccgccccggaggccatttcctaccggaagttcacctctgccagcgacgtgtggagctttggcattgtcatgtgggaggtgatgacctatggcgagcggccctactgggagttgtccaaccacgaggtgatgaaagccatcaatgatggcttccggctccccacacccatggactgcccctccgccatctaccagctcatgatgcagtgctggcagcaggagcgtgcccgccgccccaagttcgctgacatcgtcagcatcctggacaagctcattcgtgcccctgactccctcaagaccctggctgactttgacccccgcgtgtctatccggctccccagcacgagcggctcggagggggtgcccttccgcacggtgtccgagtggctggagtccatcaagatgcagcagtatacggagcacttcatggcggccggctacactgccatcgagaaggtggtgcagatgaccaacgacgacatcaagaggattggggtgcggctgcccggccaccagaagcgcatcgcctacagcctgctgggactcaaggaccaggtgaacactgtggggatccccatctga

SEQ ID NO: 338 - DNA, 2931 bp, Homo sapiens
atggagctccaggcagcccgcgcctgcttcgccctgctgtggggctgtgcgctggccgcggccgcggcggcgcagggcaaggaagtggtactgctggactttgctgcagctggaggggagctcggctggctcacacacccgtatggcaaagggtgggacctgatgcagaacatcatgaatgacatgccgatctacatgtactccgtgtgcaacgtgatgtctggcgaccaggacaactggctccgcaccaactgggtgtaccgaggagaggctgagcgtatcttcattgagctcaagtttactgtacgtgactgcaacagcttccctggtggcgccagctcctgcaaggagactttcaacctctactatgccgagtcggacctggactacggcaccaacttccagaagcgcctgttcaccaagattgacaccattgcgcccgatgagatcaccgtcagcagcgacttcgaggcacgccacgtgaagctgaacgtggaggagcgctccgtggggccgctcacccgcaaaggcttctacctggccttccaggatatcggtgcctgtgtggcgctgctctccgtccgtgtctactacaagaagtgccccgagctgctgcagggcctggcccacttccctgagaccatcgccggctctgatgcaccttccctggccactgtggccggcacctgtgtggaccatgccgtggtgccaccggggggtgaagagccccgtatgcactgtgcagtggatggcgagtggctggtgcccattgggcagtgcctgtgccaggcaggctacgagaaggtggaggatgcctgccaggcctgctcgcctggattttttaagtttgaggcatctgagagcccctgcttggagtgccctgagcacacgctgccatcccctgagggtgccacctcctgcgagtgtgaggaaggcttcttccgggcacctcaggacccagcgtcgatgccttgcacacgacccccctccgccccacactacctcacagccgtgggcatgggtgccaaggtggagctgcgctggacgccccctcaggacagcgggggccgcgaggacattgtctacagcgtcacctgcgaacagtgctggcccgagtctggggaatgcgggccgtgtgaggccagtgtgcgctactcggagcctcctcacggactgacccgcaccagtgtgacagtgagcgacctggagccccacatgaactacaccttcaccgtggaggcccgcaatggcgtctcaggcctggtaaccagccgcagcttccgtactgccagtgtcagcatcaaccagacagagccccccaaggtgaggctggagggccgcagcaccacctcgcttagcgtctcctggagcatccccctgccgcagcagagccgagtgtggaagtacgaggtcacttaccgcaagaagggagactccaacagctacaatgtgcgccgcaccgagggtttctccgtgaccctggacgacctggccccagacaccacctacctggtccaggtgcaggcactgacgcaggagggccagggggccggcagcaaggtgcacgaattccagacgctgtccccggagggatctggcaacttggcggtgattggcggcgtggctgtcggtgtggtcctgcttctggtgctggcaggagttggcttctttatccaccgcaggaggaagaaccagcgtgcccgccagtccccggaggacgtttacttctccaagtcagaacaactgaagcccctgaagacatacgtggacccccacacatatgaggaccccaaccaggctgtgttgaagttcactaccgagatccatccatcctgtgtcactcggcagaaggtgatcggagcaggagagtttggggaggtgtacaagggcatgctgaagacatcctcggggaagaaggaggtgccggtggccatcaagacgctgaaagccggctacacagagaagcagcgagtggacttcctcggcgaggccggcatcatgggccagttcagccaccacaacatcatccgcctagagggcgtcatctccaaatacaagcccatgatgatcatcactgagtacatggagaatggggccctggacaagttccttcgggagaaggatggcgagttcagcgtgctgcagctggtgggcatgctgcggggcatcgcagctggcatgaagtacctggccaacatgaactatgtgcaccgtgacctggctgcccgcaacatcctcgtcaacagcaacctggtctgcaaggtgtctgactttggcctgtcccgcgtgctggaggacgaccccgaggccacctacaccaccagtggcggcaagatccccatccgctggaccgccccggaggccatttcctaccggaagttcacctctgccagcgacgtgtggagctttggcattgtcatgtgggaggtgatgacctatggcgagcggccctactgggagttgtccaaccacgaggtgatgaaagccatcaatgatggcttccggctccccacacccatggactgcccctccgccatctaccagctcatgatgcagtgctggcagcaggagcgtgcccgccgccccaagttcgctgacatcgtcagcatcctggacaagctcattcgtgcccctgactccctcaagaccctggctgactttgacccccgcgtgtctatccggctccccagcacgagcggctcggagggggtgcccttccgcacggtgtccgagtggctggagtccatcaagatgcagcagtatacggagcacttcatggcggccggctacactgccatcgagaaggtggtgcagatgaccaacgacgacatcaagaggattggggtgcggctgcccggccaccagaagcgcatcgcctacagcctgctgggactcaaggaccaggtgaacactgtggggatccccatctga

SEQ ID NO: 339 - DNA, 2931 bp, Homo sapiens
atggagctccaggcagcccgcgcctgcttcgccctgctgtggggctgtgcgctggccgcggccgcggcggcgcagggcaaggaagtggtactgctggactttgctgcagctggaggggagctcggctggctcacacacccgtatggcaaagggtgggacctgatgcagaacatcatgaatgacatgccgatctacatgtactccgtgtgcaacgtgatgtctggcgaccaggacaactggctccgcaccaactgggtgtaccgaggagaggctgagcgtatcttcattgagctcaagtttactgtacgtgactgcaacagcttccctggtggcgccagctcctgcaaggagactttcaacctctactatgccgagtcggacctggactacggcaccaacttccagaagcgcctgttcaccaagattgacaccattgcgcccgatgagatcaccgtcagcagcgacttcgaggcacgccacgtgaagctgaacgtggaggagcgctccgtggggccgctcacccgcaaaggcttctacctggccttccaggatatcggtgcctgtgtggcgctgctctccgtccgtgtctactacaagaagtgccccgagctgctgcagggcctggcccacttccctgagaccatcgccggctctgatgcaccttccctggccactgtggccggcacctgtgtggaccatgccgtggtgccaccggggggtgaagagccccgtatgcactgtgcagtggatggcgagtggctggtgcccattgggcagtgcctgtgccaggcaggctacgagaaggtggaggatgcctgccaggcctgctcgcctggattttttaagtttgaggcatctgagagcccctgcttggagtgccctgagcacacgctgccatcccctgagggtgccacctcctgcgagtgtgaggaaggcttcttccgggcacctcaggacccagcgtcgatgccttgcacacgacccccctccgccccacactacctcacagccgtgggcatgggtgccaaggtggagctgcgctggacgccccctcaggacagcgggggccgcgaggacattgtctacagcgtcacctgcgaacagtgctggcccgagtctggggaatgcgggccgtgtgaggccagtgtgcgctactcggagcctcctcacggactgacccgcaccagtgtgacagtgagcgacctggagccccacatgaactacaccttcaccgtggaggcccgcaatggcgtctcaggcctggtaaccagccgcagcttccgtactgccagtgtcagcatcaaccagacagagccccccaaggtgaggctggagggccgcagcaccacctcgcttagcgtctcctggagcatccccccgccgcagcagagccgagtgtggaagtacgaggtcacttaccgcaagaagggagactccaacagctacaatgtgcgccgcaccgagggtttctccgtgaccctggacgacctggccccagacaccacctacctggtccaggtgcaggcactgacgcaggagggccagggggccggcagcaaggtgcacgaattccagacgctgtccccggagggatctggcaacttggcggtgattggcggcgtggctgtcggtgtggtcctgcttctggtgctggcaggagttggcttctttatccaccgcaggaggaagaaccagcgtgcccgccagtccccggaggacgtttacttctccaagtcagaacaactgaagcccctgaagacatacgtggacccccacacatatgaggaccccaaccaggctgtgttgaagttcactaccgagatctatccatcctgtgtcactcggcagaaggtgatcggagcaggagagtttggggaggtgtacaagggcatgctgaagacatcctcggggaagaaggaggtgccggtggccatcaagacgctgaaagccggctacacagagaagcagcgagtggacttcctcggcgaggccggcatcatgggccagttcagccaccacaacatcatccgcctagagggcgtcatctccaaatacaagcccatgatgatcatcactgagtacatggagaatggggccctggacaagttccttcgggagaaggatggcgagttcagcgtgctgcagctggtgggcatgctgcggggcatcgcagctggcatgaagtacctggccaacatgaactatgtgcaccgtgacctggctgcccgcaacatcctcgtcaacagcaacctggtctgcaaggtgtctgactttggcctgtcccgcgtgctggaggacgaccccgaggccacctacaccaccagtggcggcaagatccccatccgctggaccgccccggaggccatttcctaccggaagttcacctctgccagcgacgtgtggagctttggcattgtcatgtgggaggtgatgacctatggcgagcggccctactgggagttgtccaaccacgaggtgatgaaagccatcaatgatggcttccggctccccacacccatggactgcccctccgccatctaccagctcatgatgcagtgctggcagcaggagcgtgcccgccgccccaagttcgctgacatcgtcagcatcctggacaagctcattcgtgcccctgactccctcaagaccctggctgactttgacccccgcgtgtctatccggctccccagcacgagcggctcggagggggtgcccttccgcacggtgtccgagtggctggagtccatcaagatgcagcagtatacggagcacttcatggcggccggctacactgccatcgagaaggtggtgcagatgaccaacgacgacatcaagaggattggggtgcggctgcccggccaccagaagcgcatcgcctacagcctgctgggactcaaggaccaggtgaacactgtggggatccccatctga

SEQ ID NO: 340 - DNA, 2931 bp, Homo sapiens
atggagctccaggcagcccgcgcctgcttcgccctgctgtggggctgtgcgctggccgcggccgcggcggcgcagggcaaggaagtggtactgctggactttgctgcagctggaggggagctcggctggctcacacacccgtatggcaaagggtgggacctgatgcagaacatcatgaatgacatgccgatctacatgtactccgtgtgcaacgtgatgtctggcgaccaggacaactggctccgcaccaactgggtgtaccgaggagaggctgagcgtatcttcattgagctcaagtttactgtacgtgactgcaacagcttccctggtggcgccagctcctgcaaggagactttcaacctctactatgccgagtcggacctggactacggcaccaacttccagaagcgcctgttcaccaagattgacaccattgcgcccgatgagatcaccgtcagcagcgacttcgaggcacgccacgtgaagctgaacgtggaggagcgctccgtggggccgctcacccgcaaaggcttctacctggccttccaggatatcggtgcctgtgtggcgctgctctccgtccgtgtctactacaagaagtgccccgagctgctgcagggcctggcccacttccctgagaccatcgccggctctgatgcaccttccctggccactgtggccggcacctgtgtggaccatgccgtggtgccaccggggggtgaagagccccgtatgcactgtgcagtggatggcgagtggctggtgcccattgggcagtgcctgtgccaggcaggctacgagaaggtggaggatgcctgccaggcctgctcgcctggattttttaagtttgaggcatctgagagcccctgcttggagtgccctgagcacacgctgccatcccctgagggtgccacctcctgcgagtgtgaggaaggcttcttccgggcacctcaggacccagcgtcgatgccttgcacacgacccccctccgccccacactacctcacagccgtgggcatgggtgccaaggtggagctgcgctggacgccccctcaggacagcgggggccgcgaggacattgtctacagcgtcacctgcgaacagtgctggcccgagtctggggaatgcgggccgtgtgaggccagtgtgcgctactcggagcctcctcacggactgacccgcaccagtgtgacagtgagcgacctggagccccacatgaactacaccttcaccgtggaggcccgcaatggcgtctcaggcctggtaaccagccgcagcttccgtactgccagtgtcagcatcaaccagacagagccccccaaggtgaggctggagggccgcagcaccacctcgcttagcgtctcctggagcatccccccgccgcagcagagccgagtgtggaagtacgaggtcacttaccgcaagaagggagactccaacagctacaatgtgcgccgcaccgagggtttctccgtgaccctggacgacctggccccagacaccacctacctggtccaggtgcaggcactgacgcaggagggccagggggccggcagcaaggtgcacgaattccagacgctgtccccggagggatctggcaacttggcggtgattggcggcgtggctgtcggtgtggtcctgcttctggtgctggcaggagttggcttctttatccaccgcaggaggaagaaccagcgtgcccgccagtccccggaggacgtttacttctccaagtcagaacaactgaagcccctgaagacatacgtggacccccacacatatgaggaccccaaccaggctgtgttgaagttcactaccgagatccatccatcctgtgtcactcggcagaaggtgatcggagcaggagagtttggggaggtgtacaagggcacgctgaagacatcctcggggaagaaggaggtgccggtggccatcaagacgctgaaagccggctacacagagaagcagcgagtggacttcctcggcgaggccggcatcatgggccagttcagccaccacaacatcatccgcctagagggcgtcatctccaaatacaagcccatgatgatcatcactgagtacatggagaatggggccctggacaagttccttcgggagaaggatggcgagttcagcgtgctgcagctggtgggcatgctgcggggcatcgcagctggcatgaagtacctggccaacatgaactatgtgcaccgtgacctggctgcccgcaacatcctcgtcaacagcaacctggtctgcaaggtgtctgactttggcctgtcccgcgtgctggaggacgaccccgaggccacctacaccaccagtggcggcaagatccccatccgctggaccgccccggaggccatttcctaccggaagttcacctctgccagcgacgtgtggagctttggcattgtcatgtgggaggtgatgacctatggcgagcggccctactgggagttgtccaaccacgaggtgatgaaagccatcaatgatggcttccggctccccacacccatggactgcccctccgccatctaccagctcatgatgcagtgctggcagcaggagcgtgcccgccgccccaagttcgctgacatcgtcagcatcctggacaagctcattcgtgcccctgactccctcaagaccctggctgactttgacccccgcgtgtctatccggctccccagcacgagcggctcggagggggtgcccttccgcacggtgtccgagtggctggagtccatcaagatgcagcagtatacggagcacttcatggcggccggctacactgccatcgagaaggtggtgcagatgaccaacgacgacatcaagaggattggggtgcggctgcccggccaccagaagcgcatcgcctacagcctgctgggactcaaggaccaggtgaacactgtggggatccccatctga

SEQ ID NO: 341 - DNA, 2931 bp, Homo sapiens
atggagctccaggcagcccgcgcctgcttcgccctgctgtggggctgtgcgctggccgcggccgcggcggcgcagggcaaggaagtggtactgctggactttgctgcagctggaggggagctcggctggctcacacacccgtatggcaaagggtgggacctgatgcagaacatcatgaatgacatgccgatctacatgtactccgtgtgcaacgtgatgtctggcgaccaggacaactggctccgcaccaactgggtgtaccgaggagaggctgagcgtatcttcattgagctcaagtttactgtacgtgactgcaacagcttccctggtggcgccagctcctgcaaggagactttcaacctctactatgccgagtcggacctggactacggcaccaacttccagaagcgcctgttcaccaagattgacaccattgcgcccgatgagatcaccgtcagcagcgacttcgaggcacgccacgtgaagctgaacgtggaggagcgctccgtggggccgctcacccgcaaaggcttctacctggccttccaggatatcggtgcctgtgtggcgctgctctccgtccgtgtctactacaagaagtgccccgagctgctgcagggcctggcccacttccctgagaccatcgccggctctgatgcaccttccctggccactgtggccggcacctgtgtggaccatgccgtggtgccaccggggggtgaagagccccgtatgcactgtgcagtggatggcgagtggctggtgcccattgggcagtgcctgtgccaggcaggctacgagaaggtggaggatgcctgccaggcctgctcgcctggattttttaagtttgaggcatctgagagcccctgcttggagtgccctgagcacacgctgccatcccctgagggtgccacctcctgcgagtgtgaggaaggcttcttccgggcacctcaggacccagcgtcgatgccttgcacacgacccccctccgccccacactacctcacagccgtgggcatgggtgccaaggtggagctgcgctggacgccccctcaggacagcgggggccgcgaggacattgtctacagcgtcacctgcgaacagtgctggcccgagtctggggaatgcgggccgtgtgaggccagtgtgcgctactcggagcctcctcacggactgacccgcaccagtgtgacagtgagcgacctggagccccacatgaactacaccttcaccgtggaggcccgcaatggcgtctcaggcctggtaaccagccgcagcttccgtactgccagtgtcagcatcaaccagacagagccccccaaggtgaggctggagggccgcagcaccacctcgcttagcgtctcctggagcatccccccgccgcagcagagccgagtgtggaagtacgaggtcacttaccgcaagaagggagactccaacagctacaatgtgcgccgcaccgagggtttctccgtgaccctggacgacctggccccagacaccacctacctggtccaggtgcaggcactgacgcaggagggccagggggccggcagcaaggtgcacgaattccagacgctgtccccggagggatctggcaacttggcggtgattggcggcgtggctgtcggtgtggtcctgcttctggtgctggcaggagttggcttctttatccaccgcaggaggaagaaccagcgtgcccgccagtccccggaggacgtttacttctccaagtcagaacaactgaagcccctgaagacatacgtggacccccacacatatgaggaccccaaccaggctgtgttgaagttcactaccgagatccatccatcctgtgtcactcggcagaaggtgatcggagcaggagagtttggggaggtgtacaagggcatgctgaagacatcctcggggaagaaggaggtgccggtggccatcaagacgctgaaagccggctacacagagaagcagcgagtggacttcctcagcgaggccggcatcatgggccagttcagccaccacaacatcatccgcctagagggcgtcatctccaaatacaagcccatgatgatcatcactgagtacatggagaatggggccctggacaagttccttcgggagaaggatggcgagttcagcgtgctgcagctggtgggcatgctgcggggcatcgcagctggcatgaagtacctggccaacatgaactatgtgcaccgtgacctggctgcccgcaacatcctcgtcaacagcaacctggtctgcaaggtgtctgactttggcctgtcccgcgtgctggaggacgaccccgaggccacctacaccaccagtggcggcaagatccccatccgctggaccgccccggaggccatttcctaccggaagttcacctctgccagcgacgtgtggagctttggcattgtcatgtgggaggtgatgacctatggcgagcggccctactgggagttgtccaaccacgaggtgatgaaagccatcaatgatggcttccggctccccacacccatggactgcccctccgccatctaccagctcatgatgcagtgctggcagcaggagcgtgcccgccgccccaagttcgctgacatcgtcagcatcctggacaagctcattcgtgcccctgactccctcaagaccctggctgactttgacccccgcgtgtctatccggctccccagcacgagcggctcggagggggtgcccttccgcacggtgtccgagtggctggagtccatcaagatgcagcagtatacggagcacttcatggcggccggctacactgccatcgagaaggtggtgcagatgaccaacgacgacatcaagaggattggggtgcggctgcccggccaccagaagcgcatcgcctacagcctgctgggactcaaggaccaggtgaacactgtggggatccccatctga

SEQ ID NO: 342 - DNA, 2931 bp, Homo sapiens
atggagctccaggcagcccgcgcctgcttcgccctgctgtggggctgtgcgctggccgcggccgcggcggcgcagggcaaggaagtggtactgctggactttgctgcagctggaggggagctcggctggctcacacacccgtatggcaaagggtgggacctgatgcagaacatcatgaatgacatgccgatctacatgtactccgtgtgcaacgtgatgtctggcgaccaggacaactggctccgcaccaactgggtgtaccgaggagaggctgagcgtatcttcattgagctcaagtttactgtacgtgactgcaacagcttccctggtggcgccagctcctgcaaggagactttcaacctctactatgccgagtcggacctggactacggcaccaacttccagaagcgcctgttcaccaagattgacaccattgcgcccgatgagatcaccgtcagcagcgacttcgaggcacgccacgtgaagctgaacgtggaggagcgctccgtggggccgctcacccgcaaaggcttctacctggccttccaggatatcggtgcctgtgtggcgctgctctccgtccgtgtctactacaagaagtgccccgagctgctgcagggcctggcccacttccctgagaccatcgccggctctgatgcaccttccctggccactgtggccggcacctgtgtggaccatgccgtggtgccaccggggggtgaagagccccgtatgcactgtgcagtggatggcgagtggctggtgcccattgggcagtgcctgtgccaggcaggctacgagaaggtggaggatgcctgccaggcctgctcgcctggattttttaagtttgaggcatctgagagcccctgcttggagtgccctgagcacacgctgccatcccctgagggtgccacctcctgcgagtgtgaggaaggcttcttccgggcacctcaggacccagcgtcgatgccttgcacacgacccccctccgccccacactacctcacagccgtgggcatgggtgccaaggtggagctgcgctggacgccccctcaggacagcgggggccgcgaggacattgtctacagcgtcacctgcgaacagtgctggcccgagtctggggaatgcgggccgtgtgaggccagtgtgcgctactcggagcctcctcacggactgacccgcaccagtgtgacagtgagcgacctggagccccacatgaactacaccttcaccgtggaggcccgcaatggcgtctcaggcctggtaaccagccgcagcttccgtactgccagtgtcagcatcaaccagacagagccccccaaggtgaggctggagggccgcagcaccacctcgcttagcgtctcctggagcatccccccgccgcagcagagccgagtgtggaagtacgaggtcacttaccgcaagaagggagactccaacagctacaatgtgcgccgcaccgagggtttctccgtgaccctggacgacctggccccagacaccacctacctggtccaggtgcaggcactgacgcaggagggccagggggccggcagcaaggtgcacgaattccagacgctgtccccggagggatctggcaacttggcggtgattggcggcgtggctgtcggtgtggtcctgcttctggtgctggcaggagttggcttctttatccaccgcaggaggaagaaccagcgtgcccgccagtccccggaggacgtttacttctccaagtcagaacaactgaagcccctgaagacatacgtggacccccacacatatgaggaccccaaccaggctgtgttgaagttcactaccgagatccatccatcctgtgtcactcggcagaaggtgatcggagcaggagagtttggggaggtgtacaagggcatgctgaagacatcctcggggaagaaggaggtgccggtggccatcaagacgctgaaagccggctacacagagaagcagcgagtggacttcctcggcgaggccggcatcatgggccagttcagccaccacaacatcatccgcctagagggcgtcatctccaaatacaagcccatgatgatcatcactgagtacatggagaatggggccctggacaagttccttcgggagaaggatggcgagttcagcgtgctgcagctggtgggcatgctgcggggcatcgcagctggcatgaagtacctggccaacatgaactatgtgcaccgtgacctggctgcccgcaacatcctcatcaacagcaacctggtctgcaaggtgtctgactttggcctgtcccgcgtgctggaggacgaccccgaggccacctacaccaccagtggcggcaagatccccatccgctggaccgccccggaggccatttcctaccggaagttcacctctgccagcgacgtgtggagctttggcattgtcatgtgggaggtgatgacctatggcgagcggccctactgggagttgtccaaccacgaggtgatgaaagccatcaatgatggcttccggctccccacacccatggactgcccctccgccatctaccagctcatgatgcagtgctggcagcaggagcgtgcccgccgccccaagttcgctgacatcgtcagcatcctggacaagctcattcgtgcccctgactccctcaagaccctggctgactttgacccccgcgtgtctatccggctccccagcacgagcggctcggagggggtgcccttccgcacggtgtccgagtggctggagtccatcaagatgcagcagtatacggagcacttcatggcggccggctacactgccatcgagaaggtggtgcagatgaccaacgacgacatcaagaggattggggtgcggctgcccggccaccagaagcgcatcgcctacagcctgctgggactcaaggaccaggtgaacactgtggggatccccatctga

SEQ ID NO: 343 - DNA, 2931 bp, Homo sapiens
atggagctccaggcagcccgcgcctgcttcgccctgctgtggggctgtgcgctggccgcggccgcggcggcgcagggcaaggaagtggtactgctggactttgctgcagctggaggggagctcggctggctcacacacccgtatggcaaagggtgggacctgatgcagaacatcatgaatgacatgccgatctacatgtactccgtgtgcaacgtgatgtctggcgaccaggacaactggctccgcaccaactgggtgtaccgaggagaggctgagcgtatcttcattgagctcaagtttactgtacgtgactgcaacagcttccctggtggcgccagctcctgcaaggagactttcaacctctactatgccgagtcggacctggactacggcaccaacttccagaagcgcctgttcaccaagattgacaccattgcgcccgatgagatcaccgtcagcagcgacttcgaggcacgccacgtgaagctgaacgtggaggagcgctccgtggggccgctcacccgcaaaggcttctacctggccttccaggatatcggtgcctgtgtggcgctgctctccgtccgtgtctactacaagaagtgccccgagctgctgcagggcctggcccacttccctgagaccatcgccggctctgatgcaccttccctggccactgtggccggcacctgtgtggaccatgccgtggtgccaccggggggtgaagagccccgtatgcactgtgcagtggatggcgagtggctggtgcccattgggcagtgcctgtgccaggcaggctacgagaaggtggaggatgcctgccaggcctgctcgcctggattttttaagtttgaggcatctgagagcccctgcttggagtgccctgagcacacgctgccatcccctgagggtgccacctcctgcgagtgtgaggaaggcttcttccgggcacctcaggacccagcgtcgatgccttgcacacgacccccctccgccccacactacctcacagccgtgggcatgggtgccaaggtggagctgcgctggacgccccctcaggacagcgggggccgcgaggacattgtctacagcgtcacctgcgaacagtgctggcccgagtctggggaatgcgggccgtgtgaggccagtgtgcgctactcggagcctcctcacggactgacccgcaccagtgtgacagtgagcgacctggagccccacatgaactacaccttcaccgtggaggcccgcaatggcgtctcaggcctggtaaccagccgcagcttccgtactgccagtgtcagcatcaaccagacagagccccccaaggtgaggctggagggccgcagcaccacctcgcttagcgtctcctggagcatccccccgccgcagcagagccgagtgtggaagtacgaggtcacttaccgcaagaagggagactccaacagctacaatgtgcgccgcaccgagggtttctccgtgaccctggacgacctggccccagacaccacctacctggtccaggtgcaggcactgacgcaggagggccagggggccggcagcaaggtgcacgaattccagacgctgtccccggagggatctggcaacttggcggtgattggcggcgtggctgtcggtgtggtcctgcttctggtgctggcaggagttggcttctttatccaccgcaggaggaagaaccagcgtgcccgccagtccccggaggacgtttacttctccaagtcagaacaactgaagcccctgaagacatacgtggacccccacacatatgaggaccccaaccaggctgtgttgaagttcactaccgagatccatccatcctgtgtcactcggcagaaggtgatcggagcaggagagtttggggaggtgtacaagggcatgctgaagacatcctcggggaagaaggaggtgccggtggccatcaagacgctgaaagccggctacacagagaagcagcgagtggacttcctcggcgaggccggcatcatgggccagttcagccaccacaacatcatccgcctagagggcgtcatctccaaatacaagcccatgatgatcatcactgagtacatggagaatggggccctggacaagttccttcgggagaaggatggcgagttcagcgtgctgcagctggtgggcatgctgcggggcatcgcagctggcatgaagtacctggccaacatgaactatgtgcaccgtgacctggctgcccgcaacatcctcgtcaacagcaacctggtctgcaaggtgtctgactttggcctgtcccgcgtgctggaggacgaccccgaggccacctacaccaccagtggcggcaagatccccatccgctggaccgccccggaggccatttcctaccggaagttcacctctgccagcgacgtgtggagctttggcattgtcatgtgggaggtgatgacctatggcgagcggccctactgggagttgtccaaccacgaggtgatgaaagccatcaatgatggcttccggcgccccacacccatggactgcccctccgccatctaccagctcatgatgcagtgctggcagcaggagcgtgcccgccgccccaagttcgctgacatcgtcagcatcctggacaagctcattcgtgcccctgactccctcaagaccctggctgactttgacccccgcgtgtctatccggctccccagcacgagcggctcggagggggtgcccttccgcacggtgtccgagtggctggagtccatcaagatgcagcagtatacggagcacttcatggcggccggctacactgccatcgagaaggtggtgcagatgaccaacgacgacatcaagaggattggggtgcggctgcccggccaccagaagcgcatcgcctacagcctgctgggactcaaggaccaggtgaacactgtggggatccccatctga

SEQ ID NO: 344 - DNA, 2931 bp, Homo sapiens
atggagctccaggcagcccgcgcctgcttcgccctgctgtggggctgtgcgctggccgcggccgcggcggcgcagggcaaggaagtggtactgctggactttgctgcagctggaggggagctcggctggctcacacacccgtatggcaaagggtgggacctgatgcagaacatcatgaatgacatgccgatctacatgtactccgtgtgcaacgtgatgtctggcgaccaggacaactggctccgcaccaactgggtgtaccgaggagaggctgagcgtatcttcattgagctcaagtttactgtacgtgactgcaacagcttccctggtggcgccagctcctgcaaggagactttcaacctctactatgccgagtcggacctggactacggcaccaacttccagaagcgcctgttcaccaagattgacaccattgcgcccgatgagatcaccgtcagcagcgacttcgaggcacgccacgtgaagctgaacgtggaggagcgctccgtggggccgctcacccgcaaaggcttctacctggccttccaggatatcggtgcctgtgtggcgctgctctccgtccgtgtctactacaagaagtgccccgagctgctgcagggcctggcccacttccctgagaccatcgccggctctgatgcaccttccctggccactgtggccggcacctgtgtggaccatgccgtggtgccaccggggggtgaagagccccgtatgcactgtgcagtggatggcgagtggctggtgcccattgggcagtgcctgtgccaggcaggctacgagaaggtggaggatgcctgccaggcctgctcgcctggattttttaagtttgaggcatctgagagcccctgcttggagtgccctgagcacacgctgccatcccctgagggtgccacctcctgcgagtgtgaggaaggcttcttccgggcacctcaggacccagcgtcgatgccttgcacacgacccccctccgccccacactacctcacagccgtgggcatgggtgccaaggtggagctgcgctggacgccccctcaggacagcgggggccgcgaggacattgtctacagcgtcacctgcgaacagtgctggcccgagtctggggaatgcgggccgtgtgaggccagtgtgcgctactcggagcctcctcacggactgacccgcaccagtgtgacagtgagcgacctggagccccacatgaactacaccttcaccgtggaggcccgcaatggcgtctcaggcctggtaaccagccgcagcttccgtactgccagtgtcagcatcaaccagacagagccccccaaggtgaggctggagggccgcagcaccacctcgcttagcgtctcctggagcatccccccgccgcagcagagccgagtgtggaagtacgaggtcacttaccgcaagaagggagactccaacagctacaatgtgcgccgcaccgagggtttctccgtgaccctggacgacctggccccagacaccacctacctggtccaggtgcaggcactgacgcaggagggccagggggccggcagcaaggtgcacgaattccagacgctgtccccggagggatctggcaacttggcggtgattggcggcgtggctgtcggtgtggtcctgcttctggtgctggcaggagttggcttctttatccaccgcaggaggaagaaccagcgtgcccgccagtccccggaggacgtttacttctccaagtcagaacaactgaagcccctgaagacatacgtggacccccacacatatgaggaccccaaccaggctgtgttgaagttcactaccgagatccatccatcctgtgtcactcggcagaaggtgatcggagcaggagagtttggggaggtgtacaagggcatgctgaagacatcctcggggaagaaggaggtgccggtggccatcaagacgctgaaagccggctacacagagaagcagcgagtggacttcctcggcgaggccggcatcatgggccagttcagccaccacaacatcatccgcctagagggcgtcatctccaaatacaagcccatgatgatcatcactgagtacatggagaatggggccctggacaagttccttcgggagaaggatggcgagttcagcgtgctgcagctggtgggcatgctgcggggcatcgcagctggcatgaagtacctggccaacatgaactatgtgcaccgtgacctggctgcccgcaacatcctcgtcaacagcaacctggtctgcaaggtgtctgactttggcctgtcccgcgtgctggaggacgaccccgaggccacctacaccaccagtggcggcaagatccccatccgctggaccgccccggaggccatttcctaccggaagttcacctctgccagcgacgtgtggagctttggcattgtcatgtgggaggtgatgacctatggcgagcggccctactgggagttgtccaaccacgaggtgatgaaagccatcaatgatggcttccggctccccacacccatggactgcccctccgccatctaccagctcatgatgcagtgctggcagcaggagcgtgcccgccgccccaagttcgctgacatcgtcagcatcctggacaagctcattcgtgcccctgactccctcaagaccctggctgactttgacccccgcgtgtctatccggctccccagcacgagcggctcggagggggtgcccttccgcacggtgtccaagtggctggagtccatcaagatgcagcagtatacggagcacttcatggcggccggctacactgccatcgagaaggtggtgcagatgaccaacgacgacatcaagaggattggggtgcggctgcccggccaccagaagcgcatcgcctacagcctgctgggactcaaggaccaggtgaacactgtggggatccccatctga

SEQ ID NO: 345 - DNA, 2931 bp, Homo sapiens
atggagctccaggcagcccgcgcctgcttcgccctgctgtggggctgtgcgctggccgcggccgcggcggcgcagggcaaggaagtggtactgctggactttgctgcagctggaggggagctcggctggctcacacacccgtatggcaaagggtgggacctgatgcagaacatcatgaatgacatgccgatctacatgtactccgtgtgcaacgtgatgtctggcgaccaggacaactggctccgcaccaactgggtgtaccgaggagaggctgagcgtatcttcattgagctcaagtttactgtacgtgactgcaacagcttccctggtggcgccagctcctgcaaggagactttcaacctctactatgccgagtcggacctggactacggcaccaacttccagaagcgcctgttcaccaagattgacaccattgcgcccgatgagatcaccgtcagcagcgacttcgaggcacgccacgtgaagctgaacgtggaggagcgctccgtggggccgctcacccgcaaaggcttctacctggccttccaggatatcggtgcctgtgtggcgctgctctccgtccgtgtctactacaagaagtgccccgagctgctgcagggcctggcccacttccctgagaccatcgccggctctgatgcaccttccctggccactgtggccggcacctgtgtggaccatgccgtggtgccaccggggggtgaagagccccgtatgcactgtgcagtggatggcgagtggctggtgcccattgggcagtgcctgtgccaggcaggctacgagaaggtggaggatgcctgccaggcctgctcgcctggattttttaagtttgaggcatctgagagcccctgcttggagtgccctgagcacacgctgccatcccctgagggtgccacctcctgcgagtgtgaggaaggcttcttccgggcacctcaggacccagcgtcgatgccttgcacacgacccccctccgccccacactacctcacagccgtgggcatgggtgccaaggtggagctgcgctggacgccccctcaggacagcgggggccgcgaggacattgtctacagcgtcacctgcgaacagtgctggcccgagtctggggaatgcgggccgtgtgaggccagtgtgcgctactcggagcctcctcacggactgacccgcaccagtgtgacagtgagcgacctggagccccacatgaactacaccttcaccgtggaggcccgcaatggcgtctcaggcctggtaaccagccgcagcttccgtactgccagtgtcagcatcaaccagacagagccccccaaggtgaggctggagggccgcagcaccacctcgcttagcgtctcctggagcatccccccgccgcagcagagccgagtgtggaagtacgaggtcacttaccgcaagaagggagactccaacagctacaatgtgcgccgcaccgagggtttctccgtgaccctggacgacctggccccagacaccacctacctggtccaggtgcaggcactgacgcaggagggccagggggccggcagcaaggtgcacgaattccagacgctgtccccggagggatctggcaacttggcggtgattggcggcgtggctgtcggtgtggtcctgcttctggtgctggcaggagttggcttctttatccaccgcaggaggaagaaccagcgtgcccgccagtccccggaggacgtttacttctccaagtcagaacaactgaagcccctgaagacatacgtggacccccacacatatgaggaccccaaccaggctgtgttgaagttcactaccgagatccatccatcctgtgtcactcggcagaaggtgatcggagcaggagagtttggggaggtgtacaagggcatgctgaagacatcctcggggaagaaggaggtgccggtggccatcaagacgctgaaagccggctacacagagaagcagcgagtggacttcctcggcgaggccggcatcatgggccagttcagccaccacaacatcatccgcctagagggcgtcatctccaaatacaagcccatgatgatcatcactgagtacatggagaatggggccctggacaagttccttcgggagaaggatggcgagttcagcgtgctgcagctggtgggcatgctgcggggcatcgcagctggcatgaagtacctggccaacatgaactatgtgcaccgtgacctggctgcccgcaacatcctcgtcaacagcaacctggtctgcaaggtgtctgactttggcctgtcccgcgtgctggaggacgaccccgaggccacctacaccaccagtggcggcaagatccccatccgctggaccgccccggaggccatttcctaccggaagttcacctctgccagcgacgtgtggagctttggcattgtcatgtgggaggtgatgacctatggcgagcggccctactgggagttgtccaaccacgaggtgatgaaagccatcaatgatggcttccggctccccacacccatggactgcccctccgccatctaccagctcatgatgcagtgctggcagcaggagcgtgcccgccgccccaagttcgctgacatcgtcagcatcctggacaagctcattcgtgcccctgactccctcaagaccctggctgactttgacccccgcgtgtctatccggctccccagcacgagcggctcggagggggtgcccttccgcacggtgtccgagtggctggagtccatcaagatgcagcagtatacggagcacttcatggcggccggctacactgccatcgagaagatggtgcagatgaccaacgacgacatcaagaggattggggtgcggctgcccggccaccagaagcgcatcgcctacagcctgctgggactcaaggaccaggtgaacactgtggggatccccatctga

SEQ ID NO: 346 - DNA, 2931 bp, Homo sapiens
atggagctccaggcagcccgcgcctgcttcgccctgctgtggggctgtgcgctggccgcggccgcggcggcgcagggcaaggaagtggtactgctggactttgctgcagctggaggggagctcggctggctcacacacccgtatggcaaagggtgggacctgatgcagaacatcatgaatgacatgccgatctacatgtactccgtgtgcaacgtgatgtctggcgaccaggacaactggctccgcaccaactgggtgtaccgaggagaggctgagcgtatcttcattgagctcaagtttactgtacgtgactgcaacagcttccctggtggcgccagctcctgcaaggagactttcaacctctactatgccgagtcggacctggactacggcaccaacttccagaagcgcctgttcaccaagattgacaccattgcgcccgatgagatcaccgtcagcagcgacttcgaggcacgccacgtgaagctgaacgtggaggagcgctccgtggggccgctcacccgcaaaggcttctacctggccttccaggatatcggtgcctgtgtggcgctgctctccgtccgtgtctactacaagaagtgccccgagctgctgcagggcctggcccacttccctgagaccatcgccggctctgatgcaccttccctggccactgtggccggcacctgtgtggaccatgccgtggtgccaccggggggtgaagagccccgtatgcactgtgcagtggatggcgagtggctggtgcccattgggcagtgcctgtgccaggcaggctacgagaaggtggaggatgcctgccaggcctgctcgcctggattttttaagtttgaggcatctgagagcccctgcttggagtgccctgagcacacgctgccatcccctgagggtgccacctcctgcgagtgtgaggaaggcttcttccgggcacctcaggacccagcgtcgatgccttgcacacgacccccctccgccccacactacctcacagccgtgggcatgggtgccaaggtggagctgcgctggacgccccctcaggacagcgggggccgcgaggacattgtctacagcgtcacctgcgaacagtgctggcccgagtctggggaatgcgggccgtgtgaggccagtgtgcgctactcggagcctcctcacggactgacccgcaccagtgtgacagtgagcgacctggagccccacatgaactacaccttcaccgtggaggcccgcaatggcgtctcaggcctggtaaccagccgcagcttccgtactgccagtgtcagcatcaaccagacagagccccccaaggtgaggctggagggccgcagcaccacctcgcttagcgtctcctggagcatccccccgccgcagcagagccgagtgtggaagtacgaggtcacttaccgcaagaagggagactccaacagctacaatgtgcgccgcaccgagggtttctccgtgaccctggacgacctggccccagacaccacctacctggtccaggtgcaggcactgacgcaggagggccagggggccggcagcaaggtgcacgaattccagacgctgtccccggagggatctggcaacttggcggtgattggcggcgtggctgtcggtgtggtcctgcttctggtgctggcaggagttggcttctttatccaccgcaggaggaagaaccagcgtgcccgccagtccccggaggacgtttacttctccaagtcagaacaactgaagcccctgaagacatacgtggacccccacacatatgaggaccccaaccaggctgtgttgaagttcactaccgagatccatccatcctgtgtcactcggcagaaggtgatcggagcaggagagtttggggaggtgtacaagggcatgctgaagacatcctcggggaagaaggaggtgccggtggccatcaagacgctgaaagccggctacacagagaagcagcgagtggacttcctcggcgaggccggcatcatgggccagttcagccaccacaacatcatccgcctagagggcgtcatctccaaatacaagcccatgatgatcatcactgagtacatggagaatggggccctggacaagttccttcgggagaaggatggcgagttcagcgtgctgcagctggtgggcatgctgcggggcatcgcagctggcatgaagtacctggccaacatgaactatgtgcaccgtgacctggctgcccgcaacatcctcgtcaacagcaacctggtctgcaaggtgtctgactttggcctgtcccgcgtgctggaggacgaccccgaggccacctacaccaccagtggcggcaagatccccatccgctggaccgccccggaggccatttcctaccggaagttcacctctgccagcgacgtgtggagctttggcattgtcatgtgggaggtgatgacctatggcgagcggccctactgggagttgtccaaccacgaggtgatgaaagccatcaatgatggcttccggctccccacacccatggactgcccctccgccatctaccagctcatgatgcagtgctggcagcaggagcgtgcccgccgccccaagttcgctgacatcgtcagcatcctggacaagctcattcgtgcccctgactccctcaagaccctggctgactttgacccccgcgtgtctatccggctccccagcacgagcggctcggagggggtgcccttccgcacggtgtccgagtggctggagtccatcaagatgcagcagtatacggagcacttcatggcggccggctacactgccatcgagaaggtggtgcagatgaccaacgacgacatcaagaggattggggtgtggctgcccggccaccagaagcgcatcgcctacagcctgctgggactcaaggaccaggtgaacactgtggggatccccatctga

SEQ ID NO: 347 - DNA, 2952 bp, Homo sapiens
atggattgtcagctctccatcctcctccttctcagctgctctgttctcgacagcttcggggaactgattccgcagccttccaatgaagtcaatctactggattcaaaaacaattcaaggggagctgggctggatcttttatccatcacatgggtgggaagagatcagtggtgtggatgaacattacacacccatcaggacttaccaggtgtgcaatgtcatggaccacagtcaaaacaattggctgagaacaaactgggtccccaggaactcagctcagaagatttatgtggagctcaagttcactctacgagactgcaatagcattccattggttttaggaacttgcaaggagacattcaacctgtactacatggagtctgatgatgatcatggggtgaaatttcgagagcatcagtttacaaagattgacaccattgcagctgatgaaagtttcactcaaatggatcttggggaccgtattctgaagctcaacactgagattagagaagtaggtcctgtcaacaagaagggattttatttggcatttcaagatgttggtgcttgtgttgccttggtgtctgtgagagtatacttcaaaaagtgcccatttacagtgaagaatctggctatgtttccagacacggtacccatggactcccagtccctggtggaggttagagggtcttgtgtcaacaattctaaggaggaagatcctccaaggatgtactgcagtacagaaggcgaatggcttgtacccattggcaagtgttcctgcaatgctggctatgaagaaagaggttttatgtgccaagcttgtcgaccaggtttctacaaggcattggatggtaatatgaagtgtgctaagtgcccgcctcacagttctactcaggaagatggttcaatgaactgcaggtgtgagaataattacttccgggcagacaaagaccctccatccatggcttgtacccgacctccatcttcaccaagaaatgttatctctaatataaacgagacctcagttatcctggactggagttggcccctggacacaggaggccggaaagatgttaccttcaacatcatatgtaaaaaatgtgggtggaatataaaacagtgtgagccatgcagcccaaatgtccgcttcctccctcgacagtttggactcaccaacaccacggtgacagtgacagaccttctggcacatactaactacacctttgagattgatgccgttaatggggtgtcagagctgagctccccaccaagacagtttgctgcggtcagcatcacaactaatcaggctgctccatcacctgtcctgacgattaagaaagatcggacctccagaaatagcatctctttgtcctggcaagaacctgaacatcctaatgggatcatattggactacgaggtcaaatactatgaaaagcaggaacaagaaacaagttataccattctgagggcaagaggcacaaatgttaccatcagtagcctcaagcctgacactatatacgtattccaaatccgagcccgaacagccgctggatatgggacgaacagccgcaagtttgagtttgaaactagtccagactctttctccatctctggtgaaagtagccaagtggtcatgatcgccatttcagcggcagtagcaattattctcctcactgttgtcatctatgttttgattgggaggttctgtggctataagtcaaaacatggggcagatgaaaaaagacttcattttggcaatgggcatttaaaacttccaggtctcaggacttatgttgacccacatacatatgaagaccctacccaagctgttcatgagtttgccaaggaattggatgccaccaacatatccattgataaagttgttggagcaggtgaatttggagaggtgtgcagtggtcgcttaaaacttccttcaaaaaaagagatttcagtggccattaagaccctgaaagttggctacacagaaaagcagaggagagacttcctgggagaagcaagcattatgggacagtttgaccaccccaatatcattcgactggaaggagttgttaccaaaagtaagccagttatgattgtcacagaatacatggagaatggttccttggatagtttcctacgtaaacacgatgcccagtttactgtcattcagctagtggggatgcttcgagggatagcatctggcatgaagtacctgtcagacatgggctatgttcaccgagacctcgctgctcggaacatcttgatcaacagtaacttggtgtgtaaggtttctgatttcggactttcgcgtgtcctggaggatgacccagaagctgcttatacaacaagaggagggaagatcccaatcaggtggacatcaccagaagctatagcctaccgcaagttcacgtcagccagcgatgtatggagttatgggattgttctctgggaggtgatgtcttatggagagagaccatactgggagatgtccaatcaggatgtaattaaagctgtagatgagggctatcgactgccaccccccatggactgcccagctgccttgtatcagctgatgctggactgctggcagaaagacaggaacaacagacccaagtttgagcagattgttagtattctggacaagcttatccggaatcccggcagcctgaagatcatcaccagtgcagccgcaaggccatcaaaccttcttctggaccaaagcaatgtggatatcactaccttccgcacaacaggtgactggcttaatggtgtctggacagcacactgcaaggaaatcttcacgggtgtggagtacagttcttgtgacacaatagccaagatttccacagatgacatgaaaaaggttggtgtcaccgtggttgggccacagaagaagatcatcagtagcattaaagctctagaaacgcaatcaaagaatggcccagttcccgtgtaa

SEQ ID NO: 348 - DNA, 2952 bp, Homo sapiens
atggattgtcagctctccatcctcctccttctcagctgctctgttctcgacagcttcggggaactgattccgcagccttccaatgaagtcaatctactggattcaaaaacaattcaaggggagctgggctggatctcttatccatcacatgggtggaaagagatcagtggtgtggatgaacattacacacccatcaggacttaccaggtgtgcaatgtcatggaccacagtcaaaacaattggctgagaacaaactgggtccccaggaactcagctcagaagatttatgtggagctcaagttcactctacgagactgcaatagcattccattggttttaggaacttgcaaggagacattcaacctgtactacatggagtctgatgatgatcatggggtgaaatttcgagagcatcagtttacaaagattgacaccattgcagctgatgaaagtttcactcaaatggatcttggggaccgtattctgaagctcaacactgagattagagaagtaggtcctgtcaacaagaagggattttatttggcatttcaagatgttggtgcttgtgttgccttggtgtctgtgagagtatacttcaaaaagtgcccatttacagtgaagaatctggctatgtttccagacacggtacccatggactcccagtccctggtggaggttagagggtcttgtgtcaacaattctaaggaggaagatcctccaaggatgtactgcagtacagaaggcgaatggcttgtacccattggcaagtgttcctgcaatgctggctatgaagaaagaggttttatgtgccaagcttgtcgaccaggtttctacaaggcattggatggtaatatgaagtgtgctaagtgcccgcctcacagttctactcaggaagatggttcaatgaactgcaggtgtgagaataattacttccgggcagacaaagaccctccatccatggcttgtacccgacctccatcttcaccaagaaatgttatctctaatataaacgagacctcagttatcctggactggagttggcccctggacacaggaggccggaaagatgttaccttcaacatcatatgtaaaaaatgtgggtggaatataaaacagtgtgagccatgcagcccaaatgtccgcttcctccctcgacagtttggactcaccaacaccacggtgacagtgacagaccttctggcacatactaactacacctttgagattgatgccgttaatggggtgtcagagctgagctccccaccaagacagtttgctgcggtcagcatcacaactaatcaggctgctccatcacctgtcctgacgattaagaaagatcggacctccagaaatagcatctctttgtcctggcaagaacctgaacatcctaatgggatcatattggactacgaggtcaaatactatgaaaagcaggaacaagaaacaagttataccattctgagggcaagaggcacaaatgttaccatcagtagcctcaagcctgacactatatacgtattccaaatccgagcccgaacagccgctggatatgggacgaacagccgcaagtttgagtttgaaactagtccagactctttctccatctctggtgaaagtagccaagtggtcatgatcgccatttcagcggcagtagcaattattctcctcactgttgtcatctatgttttgattgggaggttctgtggctataagtcaaaacatggggcagatgaaaaaagacttcattttggcaatgggcatttaaaacttccaggtctcaggacttatgttgacccacatacatatgaagaccctacccaagctgttcatgagtttgccaaggaattggatgccaccaacatatccattgataaagttgttggagcaggtgaatttggagaggtgtgcagtggtcgcttaaaacttccttcaaaaaaagagatttcagtggccattaagaccctgaaagttggctacacagaaaagcagaggagagacttcctgggagaagcaagcattatgggacagtttgaccaccccaatatcattcgactggaaggagttgttaccaaaagtaagccagttatgattgtcacagaatacatggagaatggttccttggatagtttcctacgtaaacacgatgcccagtttactgtcattcagctagtggggatgcttcgagggatagcatctggcatgaagtacctgtcagacatgggctatgttcaccgagacctcgctgctcggaacatcttgatcaacagtaacttggtgtgtaaggtttctgatttcggactttcgcgtgtcctggaggatgacccagaagctgcttatacaacaagaggagggaagatcccaatcaggtggacatcaccagaagctatagcctaccgcaagttcacgtcagccagcgatgtatggagttatgggattgttctctgggaggtgatgtcttatggagagagaccatactgggagatgtccaatcaggatgtaattaaagctgtagatgagggctatcgactgccaccccccatggactgcccagctgccttgtatcagctgatgctggactgctggcagaaagacaggaacaacagacccaagtttgagcagattgttagtattctggacaagcttatccggaatcccggcagcctgaagatcatcaccagtgcagccgcaaggccatcaaaccttcttctggaccaaagcaatgtggatatcactaccttccgcacaacaggtgactggcttaatggtgtctggacagcacactgcaaggaaatcttcacgggtgtggagtacagttcttgtgacacaatagccaagatttccacagatgacatgaaaaaggttggtgtcaccgtggttgggccacagaagaagatcatcagtagcattaaagctctagaaacgcaatcaaagaatggcccagttcccgtgtaa

SEQ ID NO: 349 - DNA, 2952 bp, Homo sapiens
atggattgtcagctctccatcctcctccttctcagctgctctgttctcgacagcttcggggaactgattccgcagccttccaatgaagtcaatctactggattcaaaaacaattcaaggggagctgggctggatctcttatccatcacatgggtgggaagagatcagtggtgtggatgaacattacacacccatcaggacttaccaggtgtgcaatgtcatggaccacagtcaaaacaattggctgagaacaaactgggtccccaggaactcagctcagaagatttatgtggagctcaagttcactctacgagactgcaatagcattccattggttttaggaacttgcaaggagacattcaacctgtactacatggagtctgatgatgatcatggggtgaaatttcgagagcatcagtttacaaagattgacaccattgcagctgatgaaagtttcactcaaatggatcttggggaccgtattctgaagctcaacactgagattagagaagtaggtcctgtcaacaagaagggattttatttggcatttcaagatgttggtgcttgtgttgccttggtgtctgtgagagtatacttcaaaaagtgcccatttacagtgaagaatctggctatgtttccagacacggtacccatggactcccagtccctggtggaggttagagggtcttgtgtcaacaattctaaggaggaagatcctccaaggatgtactgcagtacagaaggcgaatggcttgtacccattggcaagtgttcctgcaatgctggctatgaagaaagaggttttatgtgccaagcttgtcgaccaggtttctacaaggcattggatggtaatatgaagtgtgctaagtgcccgcctcacagttctactcaggaagatggttcaatgaactgcaggtgtgagaataattacttccgggcagacaaagaccctccatccatggcttgtacccgacctccatcttcaccaagaaatgttatctctaatataaacgagacctcagttatcctggactggagttggcccctggacacaggaggccggaaagatgttaccttcaacatcatatgtaaaaaatgtgggtggaatataaaacagtgtgagccatgcagcccaaatgtccgcttcctccctcgacagtttggactcaccaacaccacggtgacagtgacagaccttctggcacatactaactacacctttgagattgatgccgttaatggggtgtcagagctgagctccccaccaagacagtttgctgcggtcagcatcacaactaatcaggctgctccatcacctgtcctgacgattaagaaagatcggacctccagaaatagcatctctttgtcctggcaagaacctgaacatcctaatgggatcatattggactacgaggtcaaatactatgaaaagcaggaacaagaaacaagttataccattctgagggcaagaggcacaaatgttaccatcagtagcctcaagcctgacactatatacgtattccaaatccgagcccgaacagccgctggatatgggacgaacagccgcaagtttgagtttgaaactagtccagactctttctccatctctggtgaaagtagccaagtggtcatgatcgccatttcagcggcagtagcaattattctcctcactgttgtcatctatgttttgattgggaggttctgtggctataagtcaaaacatggggcagatgaaaaaagacttcattttggcaatgggcatttaaaacttccaggtctcaggacttatgttgacccacatacatatgaagaccctacccaagctgttcatgagtttgccaaggaattggatgccaccaacatatccattgataaagttgttggagcaggtgaatttggagaggtgtgcagtggtcgcttaaaacttccttcaaaaaaagagatttcagtggccattaagaccctgaaagttggctacacagaaaagcagaggagagacttcctgggagaagcaagcattatgggacagtttgaccaccccaatatcattcgactggaaggagttgttaccaaaagtaagccagttatgattgtcacagaatacatggagaatggttccttggatagtttcctacgtaaacacgatgcccagtttactgtcattcagctagtggggatgcttcgagggatagcatctggcatgaagtacctgtcagacatgggctatgttcaccgagacctcgctgctcggaacatcttgatcaacagtaacttggtgtgtaaggtttctgatttcggactttcgcgtgtcctggaggatgacccagaaggtgcttatacaacaagaggagggaagatcccaatcaggtggacatcaccagaagctatagcctaccgcaagttcacgtcagccagcgatgtatggagttatgggattgttctctgggaggtgatgtcttatggagagagaccatactgggagatgtccaatcaggatgtaattaaagctgtagatgagggctatcgactgccaccccccatggactgcccagctgccttgtatcagctgatgctggactgctggcagaaagacaggaacaacagacccaagtttgagcagattgttagtattctggacaagcttatccggaatcccggcagcctgaagatcatcaccagtgcagccgcaaggccatcaaaccttcttctggaccaaagcaatgtggatatcactaccttccgcacaacaggtgactggcttaatggtgtctggacagcacactgcaaggaaatcttcacgggtgtggagtacagttcttgtgacacaatagccaagatttccacagatgacatgaaaaaggttggtgtcaccgtggttgggccacagaagaagatcatcagtagcattaaagctctagaaacgcaatcaaagaatggcccagttcccgtgtaa

SEQ ID NO: 350 - DNA, 2961 bp, Homo sapiens
atggctgggattttctatttcgccctattttcgtgtctcttcgggatttgcgacgctgtcacaggttccagggtataccccgcgaatgaagttaccttattggattccagatctgttcagggagaacttgggtggatagcaagccctctggaaggagggtgggaggaagtgagtatcatggatgaaaaaaatacaccaatccgaacctaccaagtgtgcaatgtgatggaacccagccagaataactggctacgaactgattggatcacccgagaaggggctcagagggtgtatattgagattaaattcaccttgagggactgcaatagtcttccgggcgtcatggggacttgcaaggagacgtttaacctgtactactatgaatcagacaacgacaaagagcgtttcatcagagagaaccagtttgtcaaaattgacaccattgctgctgatgagagcttcacccaagtggacattggtgacagaatcatgaagctgaacaccgagatccgggatgtagggccattaagcaaaaaggggttttacctggcttttcaggatgtgggggcctgcatcgccctggtatcagtccgtgtgttctataaaaagtgtccactcacagtccgcaatctggcccagtttcctgacaccatcacaggggctgatacgtcttccctggtggaagttcgaggctcctgtttcaacaactcagaagagaaagatgtgccaaaaatgtactgtggggcagatggtgaatggctggtacccattggcaactgcctatgcaacgctgggcatgaggagcggagcggagaatgccaagcttgcaaaattggatattacaaggctctctccacggatgccacctgtgccaagtgcccaccccacagctactctgtctgggaaggagccacctcgtgcacctgtgaccgaggctttttcagagctgacaacgatgctgcctctatgccctgcacccgtccaccatctgctcccctgaacttgatttcaaatgtcaacgagacatctgtgaacttggaatggagtagccctcagaatacaggtggccgccaggacatttcctataatgtggtatgcaagaaatgtggagctggtgaccccagcaagtgccgaccctgtggaagtggggtccactacaccccacagcagaatggcttgaagaccaccaaagtctccatcactgacctcctagctcataccaattacacctttgaaatctgggctgtgaatggagtgtccaaatataaccctaacccagaccaatcagtttctgtcactgtgaccaccaaccaagcagcaccatcatccattgctttggtccaggctaaagaagtcacaagatacagtgtggcactggcttggctggaaccagatcggcccaatggggtaatcctggaatatgaagtcaagtattatgagaaggatcagaatgagcgaagctatcgtatagttcggacagctgccaggaacacagatatcaaaggcctgaaccctctcacttcctatgttttccacgtgcgagccaggacagcagctggctatggagacttcagtgagcccttggaggttacaaccaacacagtgccttcccggatcattggagatggggctaactccacagtccttctggtctctgtctcgggcagtgtggtgctggtggtaattctcattgcagcttttgtcatcagccggagacggagtaaatacagtaaagccaaacaagaagcggatgaagagaaacatttgaatcaaggtgtaagaacatatgtggacccctttacgtacgaagatcccaaccaagcagtgcgagagtttgccaaagaaattgacgcatcctgcattaagattgaaaaagttataggagttggtgaatttggtgaggtatgcagtgggcgtctcaaagtgcctggcaagagagagatctgtgtggctatcaagactctgaaagctggttatacagacaaacagaggagagacttcctgagtgaggccagcatcatgggacagtttgaccatccgaacatcattcacttggaaggcgtggtcactaaatgtaaaccagtaatgatcataacagagtacatggagaatggctccttggatgcattcctcaggaaaaatgatggcagatttacagtcattcagctggtgggcatgcttcgtggcattgggtctgggatgaagtatttatctgatatgagctatgtgcatcgtgatctggccgcacggaacatcctggtgaacagcaacttggtctgcaaagtgtctgattttggcatgtcccgagtgcttgaggatgatccggaagcagcttacaccaccaggggtggcaagattcctatccggtggactgcgccagaagcaattgcctatcgtaaattcacatcagcaagtgatgtatggagctatggaatcgttatgtgggaagtgatgtcgtacggggagaggccctattgggatatgtccaatcaagatgtgattaaagccattgaggaaggctatcggttaccccctccaatggactgccccattgcgctccaccagctgatgctagactgctggcagaaggagaggagcgacaggcctaaatttgggcagattgtcaacatgttggacaaactcatccgcaaccccaacagcttgaagaggacagggacggagagctccagacctaacactgccttgttggatccaagctcccctgaattctctgctgtggtatcagtgggcgattggctccaggccattaaaatggaccggtataaggataacttcacagctgctggttataccacactagaggctgtggtgcacgtgaaccaggaggacctggcaagaattggtatcacagccatcacgcaccagaataagattttgagcagtgtccaggcaatgcgaacccaaatgcagcagatgcacggcagaatggttcccgtctga

SEQ ID NO: 351 - DNA, 2961 bp, Homo sapiens
atggctgggattttctatttcgccctattttcgtgtctcttcgggatttgcgacgctgtcacaggttccagggtataccccgcgaatgaagttaccttattggattccagatctgttcagggagaacttgggtggatagcaagccctctggaaggagggtgggaggaagtgagtatcatggatgaaaaaaatacaccaatccgaacctaccaagtgtgcaatgtgatggaacccagccagaataactggctacgaactgattggatcacccgagaaggggctcagagggtgtatattgagattaaattcaccttgagggactgcaatagtcttccgggcgtcatggggacttgcaaggagacgtttaacctgtactactatgaatcagacaacgacaaagagcgtttcatcagagagaaccagtttgtcaaaattgacaccattgctgctgatgagagcttcacccaagtggacattggtgacagaatcatgaagctgaacaccgagatccgggatgtagggccattaagcaaaaaggggttttacctggcttttcaggatgtgggggcctgcatcgccctggtatcagtccgtgtgttctataaaaagtgtccactcacagtccgcaatctggcccagtttcctgacaccatcacaggggctgatacgtcttccctggtggaagttcgaggctcctgtgtcaacaactcagaagagaaagatgtgccaaaaatgtactgtggggcagatggtgaatggctggtacccattggcaactgcctatgcaacgctgggcatgaggagcggagcggagaatgccaagcttgcaaaattggatattacaaggctctctccacggatgccacctgtgccaagtgcccaccccacagctactctgtctgggaaggagccacctcgtgcacctgtgaccgaggctttttcagagctgacaacgatgctgcctctatgccctgcacccgtccaccatctgctcccctgaacttgatttcaaatgtcaacgagacatctgtgaacttggaatggagtagccctcagaatacaggtggccgccaggacatttcctataatgtggtatgcaagaaatgtggagctggtgaccccagcaagtgccgaccctgtggaagtggggtccactacaccccacagcagaatggcttgaagaccaccaaagtctccatcactgacctcctagctcataccaattacacctttgaaatctgggctgtgaatggagtgtccaaatataaccctaacccagaccaatcagtttctgtcactgtgaccaccaaccaagcagcaccatcatccattgctttggtccaggctaaagaagtcacaagatacagtgtggcactggcttggctggaaccagatcggcccaatggggtaatcctggaatatgaagtcaagtattatgagaaggatcagaatgagcgaagctatcgtatagttcggacagctgccaggaacacagatatcaaaggcctgaaccctctcacttcctatgttttccacgtgcgagccaggacagcagctggctatggagacttcagtgagcccttggaggttacaaccaacacagtgccttcccggatcattggagatggggctaactccacagtccttctggtctctgtctcgggcagtgtggtgctggtggtaattctcattgcagcttttgtcatcagccggagacggagtaaatacagtaaagccaaacaagaagcggatgaagagaaacatttgaatcaaggtgtaagaacatatgtggacccctttacgtacgaagatcccaaccaagcagtgcgagagtttgccaaagaaattgacgcatcctgcattaagattgaaaaagttataggagttggtgaatttggtgaggtatgcagtgggcgtctcaaagtgcctggcaagagagagatctgtgtggctatcaagactctgaaagctggttatacagacaaacagaggagagacttcctgagtgaggccagcatcatgggacagtttgaccatccgaacatcattcacttggaaggcgtggtcactaaatgtaaaccagtaatgatcataacagagtacatggagaatggctccttggatgcattcctcaggaaaaatgatggcagatttacagtcattcagctggtgggcatgcttcgtggcattgggtctgggatgaagtatttatctgatatgagctatgtgcatcgtgatctggccgcacggaacatcctggtgaacagcaacttggtctgcaaagtgtctgattttggcatgtcccgagtgcttgaggatgatccggaagcagcttacaccaccaggggtggcaagattcctatccggtggactgcgccagaagcaattgcctatcgtaaattcacagcagcaagtgatgtatggagctatggaatcgttatgtgggaagtgatgtcgtacggggagaggccctattgggatatgtccaatcaagatgtgattaaagccattgaggaaggctatcggttaccccctccaatggactgccccattgcgctccaccagctgatgctagactgctggcagaaggagaggagcgacaggcctaaatttgggcagattgtcaacatgttggacaaactcatccgcaaccccaacagcttgaagaggacagggacggagagctccagacctaacactgccttgttggatccaagctcccctgaattctctgctgtggtatcagtgggcgattggctccaggccattaaaatggaccggtataaggataacttcacagctgctggttataccacactagaggctgtggtgcacgtgaaccaggaggacctggcaagaattggtatcacagccatcacgcaccagaataagattttgagcagtgtccaggcaatgcgaacccaaatgcagcagatgcacggcagaatggttcccgtctga

SEQ ID NO: 352 - DNA, 2961 bp, Homo sapiens
atggctgggattttctatttcgccctattttcgtgtctcttcgggatttgcgacgctgtcacaggttccagggtataccccgcgaatgaagttaccttattggattccagatctgttcagggagaacttgggtggatagcaagccctctggaaggagggtgggaggaagtgagtatcatggatgaaaaaaatacaccaatccgaacctaccaagtgtgcaatgtgatggaacccagccagaataactggctacgaactgattggatcacccgagaaggggctcagagggtgtatattgagattaaattcaccttgagggactgcaatagtcttccgggcgtcatggggacttgcaaggagacgtttaacctgtactactatgaatcagacaacgacaaagagcgtttcatcagagagaaccagtttgtcaaaattgacaccattgctgctgatgagagcttcacccaagtggacattggtgacagaatcatgaagctgaacaccgagatccgggatgtagggccattaagcaaaaaggggttttacctggcttttcaggatgtgggggcctgcatcgccctggtatcagtccgtgtgttctataaaaagtgtccactcacagtccgcaatctggcccagtttcctgacaccatcacaggggctgatacgtcttccctggtggaagttcgaggctcctgtgtcaacaactcagaagagaaagatgtgccaaaaatgtactgtggggcagatggtgaatggctggtacccattggcaactgcctatgcaacgctgggcatgaggagcggagcggagaatgccaagcttgcaaaattggatattacaaggctctctccacggatgccacctgtgccaagtgcccaccccacagctactctgtctgggaaggagccacctcgtgcacctgtgaccgaggctttttcagagctgacaacgatgctgcctctatgccctgcacccgtccaccatctgctcccctgaacttgatttcaaatgtcaacgagacatctgtgaacttggaatggagtagccctcagaatacaggtggccgccaggacatttcctataatgtggtatgcaagaaatgtggagctggtgaccccagcaagtgccgaccctgtggaagtggggtccactacaccccacagcagaatggcttgaagaccaccaaagtctccatcactgacctcctagctcataccaattacacctttgaaatctgggctgtgaatggagtgtccaaatataaccctaacccagaccaatcagtttctgtcactgtgaccaccaaccaagcagcaccatcatccattgctttggtccaggctaaagaagtcacaagatacagtgtggcactggcttggctggaaccagatcggcccaatggggtaatcctggaatatgaagtcaagtattatgagaaggatcagaatgagcgaagctatcgtatagttcggacagctgccaggaacacagatatcaaaggcctgaaccctctcacttcctatgttttccacgtgcgagccaggacagcagctggctatggagacttcagtgagcccttggaggttacaaccaacacagtgccttcccggatcattggagatggggctaactccacagtccttctggtctctgtctcgggcagtgtggtgctggtggtaattctcattgcagcttttgtcatcagccggagacggagtaaatacagtaaagccaaacaagaagcggatgaagagaaacatttgaatcaaggtgtaagaacatatgtggacccctttacgtacgaagatcccaaccaagcagtgcgagagtttgccaaagaaattgacgcatcctgcattaagattgaaaaagttataggagttggtgaatttggtgaggtatgcagtgggcgtctcaaagtgcctggcaagagagagatctgtgtggctatcaagactctgaaagctggttatacagacaaacagaggagagacttcctgagtgaggccagcatcatgggacagtttgaccatccgaacatcattcacttggaaggcgtggtcactaaatgtaaaccagtaatgatcataacagagtacatggagaatggctccttggatgcattcctcaggaaaaatgatggcagatttacagtcattcagctggtgggcatgcttcgtggcattgggtctgggatgaagtatttatctgatatgagctatgtgcatcgtgatctggccgcacggaacatcctggtgaacagcaacttggtctgcaaagtgtctgattttggcatgtcccgagtgcttgaggatgatccggaagcagcttacaccaccaggggtggcaagattcctatccggtggactgcgccagaagcaattgcctatcgtaaattcacatcagcaagtgatgtatggagctatggaatcgttatgtgggaagtgatgtcgtacggggagaggccctattgggatatgtccaatcaagatgtgattaaagccattgaggaaggctatcggttaccccctccaatggactgccccattgcgctccaccagctgatgctagactgctggcagaaggagaggagcgacaggcctaaatttgggcagattgtcaacgtgttggacaaactcatccgcaaccccaacagcttgaagaggacagggacggagagctccagacctaacactgccttgttggatccaagctcccctgaattctctgctgtggtatcagtgggcgattggctccaggccattaaaatggaccggtataaggataacttcacagctgctggttataccacactagaggctgtggtgcacgtgaaccaggaggacctggcaagaattggtatcacagccatcacgcaccagaataagattttgagcagtgtccaggcaatgcgaacccaaatgcagcagatgcacggcagaatggttcccgtctga

SEQ ID NO: 353 - DNA, 3114 bp, Homo sapiens
atgcggggctcggggccccggggtgcgggacaccggcggcccccaagcggcggcggcgacacccccatcaccccagcgtccctggccggctgctactctgcacctcgacgggctcccctctggacgtgccttctcctgtgcgccgcactccggaccctcctggccagccccagcaacgaagtgaatttattggattcacgcactgtcatgggggacctgggatggattgcttttccaaaaactgggtgggaagagattggtgaagtggatgaaaattatgcccctatccacacataccaagtatgcaaagtgatggaacagaatcagaataactggcttttgaccagttggatctccaatgaaggtgcttccagaatcttcatagaactcaaatttaccctgcgggactgcaacagccttcctggaggactggggacctgtaaggaaacctttaatatgtattactttgagtcagatgatcagaatgggagaaacatcaaggaaaaccaatacatcaaaattgataccattgctgccgatgaaagctttacagaacttgatcttggtgaccgtgttatgaaactgaatacagaggtcagagatgtaggacctctaagcaaaaagggattttatcttgcttttcaagatgttggtgcttgcattgctctggtttctgtgcgtgtatactataaaaaatgcccttctgtggtacgacacttggctgtcttccctgacaccatcactggagctgattcttcccaattgctcgaagtgtcaggctcctgtgtcaaccattctgtgaccgatgaacctcccaaaatgcactgcagcgccgaaggggagtggctggtgcccatcgggaaatgcatgtgcaaggcaggatatgaagagaaaaatggcacctgtcaagtgtgcagacctgggttcttcaaagcctcacctcacatccagagctgcggcaaatgtccacctcacagttatacccatgaggaagcttcaacctcttgtgtctgtgaaaaggattatttcaggagagagtctgatccacccacaatggcatgcacaagacccccctctgctcctcggaatgccatctcaaatgttaatgaaactagtgtctttctggaatggattccgcctgctgacactggtggaaggaaagacgtgtcatattatattgcatgcaagaagtgcaactcccatgcaggtgtgtgtgaggagtgtggcggtcatgtcaggtaccttccccggcaaagcggcctgaaaaacacctctgtcatgatggtggatctactcgctcacacaaactatacctttgagattgaggcagtgaatggagtgtccgacttgagcccaggagcccggcagtatgtgtctgtaaatgtaaccacaaatcaagcagctccatctccagtcaccaatgtgaaaaaagggaaaattgcaaaaaacagcatctctttgtcttggcaagaaccagatcgtcccaatggaatcatcctagagtatgaaatcaagtattttgaaaaggaccaagagaccagctacacgattatcaaatctaaagagacaactattactgcagagggcttgaaaccagcttcagtttatgtcttccaaattcgagcacgtacagcagcaggctatggtgtcttcagtcgaagatttgagtttgaaaccaccccagtgtttgcagcatccagcgatcaaagccagattcctgtaattgctgtgtctgtgacagtgggagtcattttgttggcagtggttatcggcgtcctcctcagtggaagttgctgcgaatgtggctgtgggagggcttcttccctgtgcgctgttgcccatccaagcctaatatggcggtgtggctacagcaaagcaaaacaagatccagaagaggaaaagatgcattttcataatgggcacattaaactgccaggagtaagaacttacattgatccacatacctatgaggatcccaatcaagctgtccacgaatttgctaaggagatagaagcatcatgtatcaccattgagagagttattggagcaggtgaatttggtgaagtttgtagtggacgtttgaaactaccaggaaaaagagaattacctgtggctatcaaaacccttaaagtaggctatactgaaaagcaacgcagagatttcctaggtgaagcaagtatcatgggacagtttgatcatcctaacatcatccatttagaaggtgtggtgaccaaaagtaaaccagtgatgatcgtgacagagtatatggagaatggctctttagatacatttttgaagaaaaacgatgggcagttcactgtgattcagcttgttggcatgctgagaggtatctctgcaggaatgaagtacctttctgacatgggctatgtgcatagagatcttgctgccagaaacatcttaatcaacagtaaccttgtgtgcaaagtgtctgactttggactttcccgggtactggaagatgatcccgaggcagcctacaccacaaggggaggaaaaattccaatcagatggactgccccagaagcaatagctttccgaaagtttacttctgccagtgatgtctggagttatggaatagtaatgtgggaagttgtgtcttatggagagagaccctactgggagatgaccaatcaagatgtgattaaagcggtagaggaaggctatcgtctgccaagccccatggattgtcctgctgctctctatcagttaatgctggattgctggcagaaagagcgaaatagcaggcccaagtttgatgaaatagtcaacatgttggacaagctgatacgtaacccaagtagtctgaagacgctggttaatgcatcctgcagagtatctaatttattggcagaacatagcccactaggatctggggcctacagatcagtaggtgaatggctagaggcaatcaagatgggccggtatacagagattttcatggaaaatggatacagttcaatggacgctgtggctcaggtgaccttggaggatttgagacggcttggagtgactcttgtcggtcaccagaagaagatcatgaacagccttcaagaaatgaaggtgcagctggtaaacggaatggtgccattgtaa

SEQ ID NO: 354 - DNA, 3114 bp, Homo sapiens
atgcggggctcggggccccggggtgcgggacaccggcggcccccaagcggcggcggcgacacccccatcaccccagcgtccctggccggctgctactctgcacctcgacgggctcccctctggacgtgccttctcctgtgcgccgcactccggaccctcctggccagccccagcaacgaagtgaatttattggattcacgcactgtcatgggggacctgggatggattgcttttccaaaaaatgggtgggaaaagattggtgaagtggatgaaaattatgcccctatccacacataccaagtatgcaaagtgatggaacagaatcagaataactggcttttgaccagttggatctccaatgaaggtgcttccagaatcttcatagaactcaaatttaccctgcgggactgcaacagccttcctggaggactggggacctgtaaggaaacctttaatatgtattactttgagtcagatgatcagaatgggagaaacatcaaggaaaaccaatacatcaaaattgataccattgctgccgatgaaagctttacagaacttgatcttggtgaccgtgttatgaaactgaatacagaggtcagagatgtaggacctctaagcaaaaagggattttatcttgcttttcaagatgttggtgcttgcattgctctggtttctgtgcgtgtatactataaaaaatgcccttctgtggtacgacacttggctgtcttccctgacaccatcactggagctgattcttcccaattgctcgaagtgtcaggctcctgtgtcaaccattctgtgaccgatgaacctcccaaaatgcactgcagcgccgaaggggagtggctggtgcccatcgggaaatgcatgtgcaaggcaggatatgaagagaaaaatggcacctgtcaagtgtgcagacctgggttcttcaaagcctcacctcacatccagagctgcggcaaatgtccacctcacagttatacccatgaggaagcttcaacctcttgtgtctgtgaaaaggattatttcaggagagagtctgatccacccacaatggcatgcacaagacccccctctgctcctcggaatgccatctcaaatgttaatgaaactagtgtctttctggaatggattccgcctgctgacactggtggaaggaaagacgtgtcatattatattgcatgcaagaagtgcaactcccatgcaggtgtgtgtgaggagtgtggcggtcatgtcaggtaccttccccggcaaagcggcctgaaaaacacctctgtcatgatggtggatctactcgctcacacaaactatacctttgagattgaggcagtgaatggagtgtccgacttgagcccaggagcccggcagtatgtgtctgtaaatgtaaccacaaatcaagcagctccatctccagtcaccaatgtgaaaaaagggaaaattgcaaaaaacagcatctctttgtcttggcaagaaccagatcgtcccaatggaatcatcctagagtatgaaatcaagtattttgaaaaggaccaagagaccagctacacgattatcaaatctaaagagacaactattactgcagagggcttgaaaccagcttcagtttatgtcttccaaattcgagcacgtacagcagcaggctatggtgtcttcagtcgaagatttgagtttgaaaccaccccagtgtttgcagcatccagcgatcaaagccagattcctgtaattgctgtgtctgtgacagtgggagtcattttgttggcagtggttatcggcgtcctcctcagtggaagttgctgcgaatgtggctgtgggagggcttcttccctgtgcgctgttgcccatccaagcctaatatggcggtgtggctacagcaaagcaaaacaagatccagaagaggaaaagatgcattttcataatgggcacattaaactgccaggagtaagaacttacattgatccacatacctatgaggatcccaatcaagctgtccacgaatttgctaaggagatagaagcatcatgtatcaccattgagagagttattggagcaggtgaatttggtgaagtttgtagtggacgtttgaaactaccaggaaaaagagaattacctgtggctatcaaaacccttaaagtaggctatactgaaaagcaacgcagagatttcctaggtgaagcaagtatcatgggacagtttgatcatcctaacatcatccatttagaaggtgtggtgaccaaaagtaaaccagtgatgatcgtgacagagtatatggagaatggctctttagatacatttttgaagaaaaacgatgggcagttcactgtgattcagcttgttggcatgctgagaggtatctctgcaggaatgaagtacctttctgacatgggctatgtgcatagagatcttgctgccagaaacatcttaatcaacagtaaccttgtgtgcaaagtgtctgactttggactttcccgggtactggaagatgatcccgaggcagcctacaccacaaggggaggaaaaattccaatcagatggactgccccagaagcaatagctttccgaaagtttacttctgccagtgatgtctggagttatggaatagtaatgtgggaagttgtgtcttatggagagagaccctactgggagatgaccaatcaagatgtgattaaagcggtagaggaaggctatcgtctgccaagccccatggattgtcctgctgctctctatcagttaatgctggattgctggcagaaagagcgaaatagcaggcccaagtttgatgaaatagtcaacatgttggacaagctgatacgtaacccaagtagtctgaagacgctggttaatgcatcctgcagagtatctaatttattggcagaacatagcccactaggatctggggcctacagatcagtaggtgaatggctagaggcaatcaagatgggccggtatacagagattttcatggaaaatggatacagttcaatggacgctgtggctcaggtgaccttggaggatttgagacggcttggagtgactcttgtcggtcaccagaagaagatcatgaacagccttcaagaaatgaaggtgcagctggtaaacggaatggtgccattgtaa

SEQ ID NO: 355 - DNA, 3114 bp, Homo sapiens
atgcggggctcggggccccggggtgcgggacaccggcggcccccaagcggcggcggcgacacccccatcaccccagcgtccctggccggctgctactctgcacctcgacgggctcccctctggacgtgccttctcctgtgcgccgcactccggaccctcctggccagccccagcaacgaagtgaatttattggattcacgcactgtcatgggggacctgggatggattgcttttccaaaaaatgggtgggaagagattggtgaagtggatgaaaattatgcccctatccacacataccaagtatgcaaagtgatggaacagaatcagaataactggcttttgaccagttggatctccaatgaaggtgcttccagaatcttcatagaactcaaatttaccctgcgggactgcaacagccttcctggaggactggggacctgtaaggaaacctttaatatgtattactttgagtcagatgatcagaatgggagaaacatcaaggaaaaccaatacatcaaaattgataccattgctgccgatgaaagctttacagaacttgatcttggtgaccgtgttatgaaactgaatacagaggtcagagatgtaggacctctaagcaaaaagggattttatcttgcttttcaagatgttggtgcttgcattgctctggtttctgtgcgtgtatactataaaaaatgcccttctgtggtacgacacttggctgtcttccctgacaccatcactggagctgattcttcccaattgctcgaagtgtcaggctcctgtgtcaaccattctgtgaccgatgaacctcccaaaatgcactgcagcgccgaaggggagtggctggtgcccatcgggaaatgcatgtgcaaggcaggatatgaagagaaaaatggcacctgtcaagtgtgcagacctgggttcttcaaagcctcacctcacatccagagctgcggcaaatgtccacctcacagttatacccatgaggaagcttcaacctcttgtgtctgtgaaaaggattatttcaggagagagtctgatccacccacaatggcatgcacaagacccccctctgctcctcggaatgccatctcaaatgttaatgaaactagtgtctttctggaatggattccgcctgctgacactggtggaaggaaagacgtgtcatattatattgcatgcaagaagtgcaactcccatgcaggtgtgtgtgaggagtgtggcggtcatgtcaggtaccttccccggcaaagcggcctgaaaaacacctctgtcatgatggtggatctactcgctcacacaaactatacctttgagattgaggcagtgaatggagtgtccgacttgagcccaggagcccggcagtatgtgtctgtaaatgtaaccacaaatcaagcagctccatctccagtcaccaatgtgaaaaaagggaaaattgcaaaaaacagcatctctttgtcttggcaagaaccagatcgtcccaatggaatcatcctagagtatgaaatcaagtattttgaaaaggaccaagagaccagctacacgattatcaaatctaaagagacaactattactgcagagggcttgaaaccagcttcagtttatgtcttccaaattcgagcacgtacagcagcaggctatggtgtcttcagtcgaagatttgagtttgaaaccaccccagtgtttgcagcatccagcgatcaaagccagattcctgtaattgctgtgtctgtgacagtgggagtcattttgttggcagtggttatcggcgtcctcctcagtggaagttgctgcgaatgtggctgtgggagggcttcttccctgtgcgctgttgcccatccaagcctaatatggcggtgtggctacagcaaagcaaaacaagatccagaagaggaaaagatgcattttcataatgggcacattaaactgccaggagtaagaacttacattgatccacatacctatgaggatcccaatcaagctgtccacgaatttgctaaggagatagaaacatcatgtatcaccattgagagagttattggagcaggtgaatttggtgaagtttgtagtggacgtttgaaactaccaggaaaaagagaattacctgtggctatcaaaacccttaaagtaggctatactgaaaagcaacgcagagatttcctaggtgaagcaagtatcatgggacagtttgatcatcctaacatcatccatttagaaggtgtggtgaccaaaagtaaaccagtgatgatcgtgacagagtatatggagaatggctctttagatacatttttgaagaaaaacgatgggcagttcactgtgattcagcttgttggcatgctgagaggtatctctgcaggaatgaagtacctttctgacatgggctatgtgcatagagatcttgctgccagaaacatcttaatcaacagtaaccttgtgtgcaaagtgtctgactttggactttcccgggtactggaagatgatcccgaggcagcctacaccacaaggggaggaaaaattccaatcagatggactgccccagaagcaatagctttccgaaagtttacttctgccagtgatgtctggagttatggaatagtaatgtgggaagttgtgtcttatggagagagaccctactgggagatgaccaatcaagatgtgattaaagcggtagaggaaggctatcgtctgccaagccccatggattgtcctgctgctctctatcagttaatgctggattgctggcagaaagagcgaaatagcaggcccaagtttgatgaaatagtcaacatgttggacaagctgatacgtaacccaagtagtctgaagacgctggttaatgcatcctgcagagtatctaatttattggcagaacatagcccactaggatctggggcctacagatcagtaggtgaatggctagaggcaatcaagatgggccggtatacagagattttcatggaaaatggatacagttcaatggacgctgtggctcaggtgaccttggaggatttgagacggcttggagtgactcttgtcggtcaccagaagaagatcatgaacagccttcaagaaatgaaggtgcagctggtaaacggaatggtgccattgtaa

SEQ ID NO: 356 - DNA, 3114 bp, Homo sapiens
atgcggggctcggggccccggggtgcgggacaccggcggcccccaagcggcggcggcgacacccccatcaccccagcgtccctggccggctgctactctgcacctcgacgggctcccctctggacgtgccttctcctgtgcgccgcactccggaccctcctggccagccccagcaacgaagtgaatttattggattcacgcactgtcatgggggacctgggatggattgcttttccaaaaaatgggtgggaagagattggtgaagtggatgaaaattatgcccctatccacacataccaagtatgcaaagtgatggaacagaatcagaataactggcttttgaccagttggatctccaatgaaggtgcttccagaatcttcatagaactcaaatttaccctgcgggactgcaacagccttcctggaggactggggacctgtaaggaaacctttaatatgtattactttgagtcagatgatcagaatgggagaaacatcaaggaaaaccaatacatcaaaattgataccattgctgccgatgaaagctttacagaacttgatcttggtgaccgtgttatgaaactgaatacagaggtcagagatgtaggacctctaagcaaaaagggattttatcttgcttttcaagatgttggtgcttgcattgctctggtttctgtgcgtgtatactataaaaaatgcccttctgtggtacgacacttggctgtcttccctgacaccatcactggagctgattcttcccaattgctcgaagtgtcaggctcctgtgtcaaccattctgtgaccgatgaacctcccaaaatgcactgcagcgccgaaggggagtggctggtgcccatcgggaaatgcatgtgcaaggcaggatatgaagagaaaaatggcacctgtcaagtgtgcagacctgggttcttcaaagcctcacctcacatccagagctgcggcaaatgtccacctcacagttatacccatgaggaagcttcaacctcttgtgtctgtgaaaaggattatttcaggagagagtctgatccacccacaatggcatgcacaagacccccctctgctcctcggaatgccatctcaaatgttaatgaaactagtgtctttctggaatggattccgcctgctgacactggtggaaggaaagacgtgtcatattatattgcatgcaagaagtgcaactcccatgcaggtgtgtgtgaggagtgtggcggtcatgtcaggtaccttccccggcaaagcggcctgaaaaacacctctgtcatgatggtggatctactcgctcacacaaactatacctttgagattgaggcagtgaatggagtgtccgacttgagcccaggagcccggcagtatgtgtctgtaaatgtaaccacaaatcaagcagctccatctccagtcaccaatgtgaaaaaagggaaaattgcaaaaaacagcatctctttgtcttggcaagaaccagatcgtcccaatggaatcatcctagagtatgaaatcaagtattttgaaaaggaccaagagaccagctacacgattatcaaatctaaagagacaactattactgcagagggcttgaaaccagcttcagtttatgtcttccaaattcgagcacgtacagcagcaggctatggtgtcttcagtcgaagatttgagtttgaaaccaccccagtgtttgcagcatccagcgatcaaagccagattcctgtaattgctgtgtctgtgacagtgggagtcattttgttggcagtggttatcggcgtcctcctcagtggaagttgctgcgaatgtggctgtgggagggcttcttccctgtgcgctgttgcccatccaagcctaatatggcggtgtggctacagcaaagcaaaacaagatccagaagaggaaaagatgcattttcataatgggcacattaaactgccaggagtaagaacttacattgatccacatacctatgaggatcccaatcaagctgtccacgaatttgctaaggagatagaagcatcatgtatcaccattgagagagttattggagcaggtgaatttggtgaagtttgtagtggacgtttgaaactaccaggaaaaagagaattacctgtggctatcaaaacccttaaagtaggctatactgaaaagcaacgcagagatttcctaggtgaagcaagtatcatgggacagtttgatcatcctaacatcatccatttagaaggtgtggtgaccaaaagtaaaccagtgatgatcgtgacagagtatatggagaatggctctttagatacatttttgaagaaaaacgatgggcagttcactgtgattcagcttgttggcatgctgagaggtatctctgcaggaatgaagtacctttctgacatgggctatgtgcatagagatcttgctgccagaaacatcttaatcaacagtaaccttgtgtgcaaagtgtctgactttggactttcccgggtactggaagatgatcccgaggcagcctacaccacaaggggaggaaaaattccaatcagatggactgccccagaagcaatagctttccgaaagtttacttctgccagtgatgtctggagttatggaatagtaatgtgggaagttgtgtcttatggagagagaccctactgggagatgaccaatcaagatgtgattaaagcgttagaggaaggctatcgtctgccaagccccatggattgtcctgctgctctctatcagttaatgctggattgctggcagaaagagcgaaatagcaggcccaagtttgatgaaatagtcaacatgttggacaagctgatacgtaacccaagtagtctgaagacgctggttaatgcatcctgcagagtatctaatttattggcagaacatagcccactaggatctggggcctacagatcagtaggtgaatggctagaggcaatcaagatgggccggtatacagagattttcatggaaaatggatacagttcaatggacgctgtggctcaggtgaccttggaggatttgagacggcttggagtgactcttgtcggtcaccagaagaagatcatgaacagccttcaagaaatgaaggtgcagctggtaaacggaatggtgccattgtaa

SEQ ID NO: 357 - DNA, 3114 bp, Homo sapiens
atgcggggctcggggccccggggtgcgggacaccggcggcccccaagcggcggcggcgacacccccatcaccccagcgtccctggccggctgctactctgcacctcgacgggctcccctctggacgtgccttctcctgtgcgccgcactccggaccctcctggccagccccagcaacgaagtgaatttattggattcacgcactgtcatgggggacctgggatggattgcttttccaaaaaatgggtgggaagagattggtgaagtggatgaaaattatgcccctatccacacataccaagtatgcaaagtgatggaacagaatcagaataactggcttttgaccagttggatctccaatgaaggtgcttccagaatcttcatagaactcaaatttaccctgcgggactgcaacagccttcctggaggactggggacctgtaaggaaacctttaatatgtattactttgagtcagatgatcagaatgggagaaacatcaaggaaaaccaatacatcaaaattgataccattgctgccgatgaaagctttacagaacttgatcttggtgaccgtgttatgaaactgaatacagaggtcagagatgtaggacctctaagcaaaaagggattttatcttgcttttcaagatgttggtgcttgcattgctctggtttctgtgcgtgtatactataaaaaatgcccttctgtggtacgacacttggctgtcttccctgacaccatcactggagctgattcttcccaattgctcgaagtgtcaggctcctgtgtcaaccattctgtgaccgatgaacctcccaaaatgcactgcagcgccgaaggggagtggctggtgcccatcgggaaatgcatgtgcaaggcaggatatgaagagaaaaatggcacctgtcaagtgtgcagacctgggttcttcaaagcctcacctcacatccagagctgcggcaaatgtccacctcacagttatacccatgaggaagcttcaacctcttgtgtctgtgaaaaggattatttcaggagagagtctgatccacccacaatggcatgcacaagacccccctctgctcctcggaatgccatctcaaatgttaatgaaactagtgtctttctggaatggattccgcctgctgacactggtggaaggaaagacgtgtcatattatattgcatgcaagaagtgcaactcccatgcaggtgtgtgtgaggagtgtggcggtcatgtcaggtaccttccccggcaaagcggcctgaaaaacacctctgtcatgatggtggatctactcgctcacacaaactatacctttgagattgaggcagtgaatggagtgtccgacttgagcccaggagcccggcagtatgtgtctgtaaatgtaaccacaaatcaagcagctccatctccagtcaccaatgtgaaaaaagggaaaattgcaaaaaacagcatctctttgtcttggcaagaaccagatcgtcccaatggaatcatcctagagtatgaaatcaagtattttgaaaaggaccaagagaccagctacacgattatcaaatctaaagagacaactattactgcagagggcttgaaaccagcttcagtttatgtcttccaaattcgagcacgtacagcagcaggctatggtgtcttcagtcgaagatttgagtttgaaaccaccccagtgtttgcagcatccagcgatcaaagccagattcctgtaattgctgtgtctgtgacagtgggagtcattttgttggcagtggttatcggcgtcctcctcagtggaagttgctgcgaatgtggctgtgggagggcttcttccctgtgcgctgttgcccatccaagcctaatatggcggtgtggctacagcaaagcaaaacaagatccagaagaggaaaagatgcattttcataatgggcacattaaactgccaggagtaagaacttacattgatccacatacctatgaggatcccaatcaagctgtccacgaatttgctaaggagatagaagcatcatgtatcaccattgagagagttattggagcaggtgaatttggtgaagtttgtagtggacgtttgaaactaccaggaaaaagagaattacctgtggctatcaaaacccttaaagtaggctatactgaaaagcaacgcagagatttcctaggtgaagcaagtatcatgggacagtttgatcatcctaacatcatccatttagaaggtgtggtgaccaaaagtaaaccagtgatgatcgtgacagagtatatggagaatggctctttagatacatttttgaagaaaaacgatgggcagttcactgtgattcagcttgttggcatgctgagaggtatctctgcaggaatgaagtacctttctgacatgggctatgtgcatagagatcttgctgccagaaacatcttaatcaacagtaaccttgtgtgcaaagtgtctgactttggactttcccgggtactggaagatgatcccgaggcagcctacaccacaaggggaggaaaaattccaatcagatggactgccccagaagcaatagctttccgaaagtttacttctgccagtgatgtctggagttatggaatagtaatgtgggaagttgtgtcttatggagagagaccctactgggagatgaccaatcaagatgtgattaaagcggtagaggaaggctatcgtctgccaagccccatggattgtcctgctgctctctatcagttaatgctggattgctggcagaaagagcgaaatagcaggcccaagtttgatgaaatagtcaacatgttggacaagctgatacgtaacccaagtagtctgaagacgctggttaatgcatcctgcagagtatctaatttattggcagaacatagcccactaggatctggggcctacagatcagtaggtgaatggctagaggcaatcaagatgggcctgtatacagagattttcatggaaaatggatacagttcaatggacgctgtggctcaggtgaccttggaggatttgagacggcttggagtgactcttgtcggtcaccagaagaagatcatgaacagccttcaagaaatgaaggtgcagctggtaaacggaatggtgccattgtaa

SEQ ID NO: 358 - DNA, 3114 bp, Homo sapiens
atgcggggctcggggccccggggtgcgggacaccggcggcccccaagcggcggcggcgacacccccatcaccccagcgtccctggccggctgctactctgcacctcgacgggctcccctctggacgtgccttctcctgtgcgccgcactccggaccctcctggccagccccagcaacgaagtgaatttattggattcacgcactgtcatgggggacctgggatggattgcttttccaaaaaatgggtgggaagagattggtgaagtggatgaaaattatgcccctatccacacataccaagtatgcaaagtgatggaacagaatcagaataactggcttttgaccagttggatctccaatgaaggtgcttccagaatcttcatagaactcaaatttaccctgcgggactgcaacagccttcctggaggactggggacctgtaaggaaacctttaatatgtattactttgagtcagatgatcagaatgggagaaacatcaaggaaaaccaatacatcaaaattgataccattgctgccgatgaaagctttacagaacttgatcttggtgaccgtgttatgaaactgaatacagaggtcagagatgtaggacctctaagcaaaaagggattttatcttgcttttcaagatgttggtgcttgcattgctctggtttctgtgcgtgtatactataaaaaatgcccttctgtggtacgacacttggctgtcttccctgacaccatcactggagctgattcttcccaattgctcgaagtgtcaggctcctgtgtcaaccattctgtgaccgatgaacctcccaaaatgcactgcagcgccgaaggggagtggctggtgcccatcgggaaatgcatgtgcaaggcaggatatgaagagaaaaatggcacctgtcaagtgtgcagacctgggttcttcaaagcctcacctcacatccagagctgcggcaaatgtccacctcacagttatacccatgaggaagcttcaacctcttgtgtctgtgaaaaggattatttcaggagagagtctgatccacccacaatggcatgcacaagacccccctctgctcctcggaatgccatctcaaatgttaatgaaactagtgtctttctggaatggattccgcctgctgacactggtggaaggaaagacgtgtcatattatattgcatgcaagaagtgcaactcccatgcaggtgtgtgtgaggagtgtggcggtcatgtcaggtaccttccccggcaaagcggcctgaaaaacacctctgtcatgatggtggatctactcgctcacacaaactatacctttgagattgaggcagtgaatggagtgtccgacttgagcccaggagcccggcagtatgtgtctgtaaatgtaaccacaaatcaagcagctccatctccagtcaccaatgtgaaaaaagggaaaattgcaaaaaacagcatctctttgtcttggcaagaaccagatcgtcccaatggaatcatcctagagtatgaaatcaagtattttgaaaaggaccaagagaccagctacacgattatcaaatctaaagagacaactattactgcagagggcttgaaaccagcttcagtttatgtcttccaaattcgagcacgtacagcagcaggctatggtgtcttcagtcgaagatttgagtttgaaaccaccccagtgtttgcagcatccagcgatcaaagccagattcctgtaattgctgtgtctgtgacagtgggagtcattttgttggcagtggttatcggcgtcctcctcagtggaagttgctgcgaatgtggctgtgggagggcttcttccctgtgcgctgttgcccatccaagcctaatatggcggtgtggctacagcaaagcaaaacaagatccagaagaggaaaagatgcattttcataatgggcacattaaactgccaggagtaagaacttacattgatccacatacctatgaggatcccaatcaagctgtccacgaatttgctaaggagatagaagcatcatgtatcaccattgagagagttattggagcaggtgaatttggtgaagtttgtagtggacgtttgaaactaccaggaaaaagagaattacctgtggctatcaaaacccttaaagtaggctatactgaaaagcaacgcagagatttcctaggtgaagcaagtatcatgggacagtttgatcatcctaacatcatccatttagaaggtgtggtgaccaaaagtaaaccagtgatgatcgtgacagagtatatggagaatggctctttagatacatttttgaagaaaaacgatgggcagttcactgtgattcagcttgttggcatgctgagaggtatctctgcaggaatgaagtacctttctgacatgggctatgtgcatagagatcttgctgccagaaacatcttaatcaacagtaaccttgtgtgcaaagtgtctgactttggactttcccgggtactggaagatgatcccgaggcagcctacaccacaaggggaggaaaaattccaatcagatggactgccccagaagcaatagctttccgaaagtttacttctgccagtgatgtctggagttatggaatagtaatgtgggaagttgtgtcttatggagagagaccctactgggagatgaccaatcaagatgtgattaaagcggtagaggaaggctatcgtctgccaagccccatggattgtcctgctgctctctatcagttaatgctggattgctggcagaaagagcgaaatagcaggcccaagtttgatgaaatagtcaacatgttggacaagctgatacgtaacccaagtagtctgaagacgctggttaatgcatcctgcagagtatctaatttattgacagaacatagcccactaggatctggggcctacagatcagtaggtgaatggctagaggcaatcaagatgggccggtatacagagattttcatggaaaatggatacagttcaatggacgctgtggctcaggtgaccttggaggatttgagacggcttggagtgactcttgtcggtcaccagaagaagatcatgaacagccttcaagaaatgaaggtgcagctggtaaacggaatggtgccattgtaa

SEQ ID NO: 359 - DNA, 2139 bp, Homo sapiens
atggccgcgacagaggagcggagcctgcacaacttctttgccaatcgggacaagaagaagaaggagcagagcaaccgggcggcgagttccgcgggcgcagcaggcagcgcggcgggagcagtggagctccgcattctagagggcggcggggcgggcgcagggacctggctgggcgaaggcaggaccgcgagtgcggaggctgcgggcccaggggccaccaccaaggctgtgaagaatggaaaggcttggagtaaaaagagccgcgaaggcggctactgcgctgagccgctcgctctgctggtcaagtttgggcgacccgcgcggaggagggtcgggctgactgccgccgctgagctgtccccggacgggagcgcctgtccacggcactcaccccctccagcggtggaaatgtggagaacccgagctcgctcttgcgcgcgcgcgctctctccggcccaagtgaatagtcctcgcgcaagcgggacactgtggtggatgcaattcccctcgcctccagccgcgaggagctccccggcgccgcaggcagcgtcctcctccgaagcagctgcacctgcaactgggcagcctggaccctcgtgccctgttcccgggacctcgcgcagggggcgccccgggacaccccctgcgggccgggtggaggaggaagaggaggaggaggaagaagacgtggacaaggacccccatcctacccagaacacctgcctgcgctgccgccacttctctttaagggagaggaaaagagagcctaggagaaccatggggggctgcgaagtccgggaatttcttttgcaatttggtttcttcttgcctctgctgacagcgtggccaggcgactgcagtcacgtctcccacaaccaagttgtgttgcttgatacaacaactgtactgggagagctaggatggaaaacatatccattaaatgggtgggatgccatcactgaaatggatgaacataataggcccattcacacataccaggtatgtaatgtaatggaaccaaaccaaaacaactggcttcgtacaaactggatctcccgtgatgcagctcagaaaatttatgtggaaatgaaattcacactaagggattgtaacagcatcccatgggtcttggggacttgcaaagaaacatttaatctgttttatatggaatcagatgagtcccacggaattaaattcaagccaaaccagtatacaaagatcgacacaattgctgctgatgagagttttacccagatggatttgggtgatcgcatcctcaaactcaacactgaaattcgtgaggtggggcctatagaaaggaaaggattttatctggcttttcaagacattggggcgtgcattgccctggtttcagtccgtgttttctacaagaaatgccccttcactgttcgtaacttggccatgtttcctgataccattccaagggttgattcctcctctttggttgaagtacggggttcttgtgtgaagagtgctgaagagcgtgacactcctaaactgtattgtggagctgatggagattggctggttcctcttggaaggtgcatctgcagtacaggatatgaagaaattgagggttcttgccatgcttgcagaccaggattctataaagcttttgctgggaacacaaaatgttctaaatgtcctccacacagtttaacatacatggaagcaacttctgtctgtcagtgtgaaaagggttatttccgagctgaaaaagacccaccttctatggcatgtaccaggccaccttcagctcctaggaatgtggtttttaacatcaatgaaacagcccttattttggaatggagcccaccaagtgacacaggagggagaaaagatctcacatacagtgtaatctgtaagaaatgtggcttagacaccagccagtgtgaggactgtggtggaggactccgcttcatcccaagacatacaggcctgatcaacaattccgtgatagtacttgactttgtgtctcacgtgaattacacctttgaaatagaagcaatgaatggagtttctgagttgagtttttctcccaagccattcacagctattacagtgaccacggatcaagatggtaagttccactgctgttctctcaaaacagacccataa

SEQ ID NO: 360 - DNA, 2139 bp, Homo sapiens
atggccgcgacagaggagcggagcctgcacaacttctttgccaatcgggacaagaagaagaaggagcagagcaaccgggcggcgagttccgcgggcgcagcaggcagcgcggcgggagcagtggagctccgcattctagagggcggcggggcgggcgcagggacctggctgggcgaaggcaggaccgcgagtgcggaggctgcgggcccaggggccaccaccaaggctgtgaagaatggaaaggcttggagtaaaaagagccgcgaaggcggctactgcgctgagccgctcgctctgctggtcaagtttgggcgacccgcgcggaggagggtcgggctgactgccgccgctgagctgtccccggacgggagcgcctgtccacggcactcaccccctccagcggtggaaatgtggagaacccgagctcgctcttgcgcgcgcgcgctctctccggcccaagtgaatagtcctcgcgcaagcgggacactgtggtggatgcaattcccctcgcctccagccgcgaggagctccccggcgccgcaggcagcgtcctcctccgaagcagctgcacctgcaactgggcagcctggaccctcgtgccctgttcccgggacctcgcgcagggggcgccccgggacaccccctgcgggccgggtggaggaggaagaggaggaggaggaagaagacgtggacaaggacccccatcctacccagaacacctgcctgcgctgccgccacttctctttaagggagaggaaaagagagcctaggagaaccatggggggctgcgaagtccgggaatttcttttgcaatttggtttcttcttgcctctgctgacagcgtggccaggcgactgcagtcacgtctccaacaaccaagttgtgttgcttgatacaacaactgtactgggagagctaggatggaaaacatatccattaaatgggtgggatgccatcactgaaatggatgaacataataggcccattcacacataccaggtatgtaatgtaatggaaccaaaccaaaacaactggcttcgtacaaactggatctcccgtgatgcagctcagaaaatttatgtggaaatgaaattcacactaagggattgtaacagcatcccatgggtcttggggacttgcaaagaaacatttaatctgttttatatggaatcagatgagtcccacggaattaaattcaagccaaaccagtatacaaagatcgacacaattgctgctgatgagagttttacccagatggatttgggtgatcgcatcctcaaactcaacactgaaattcgtgaggtggggcctatagaaaggaaaggattttatctggcttttcaagacattggggcgtgcattgccctggtttcagtccgtgttttctacaagaaatgccccttcactgttcgtaacttggccatgtttcctgataccattccaagggttgattcctcctctttggttgaagtacggggttcttgtgtgaagagtgctgaagagcgtgacactcctaaactgtattgtggagctgatgaagattggctggttcctcttggaaggtgcatctgcagtacaggatatgaagaaattgagggttcttgccatgcttgcagaccaggattctataaagcttttgctgggaacacaaaatgttctaaatgtcctccacacagtttaacatacatggaagcaacttctgtctgtcagtgtgaaaagggttatttccgagctgaaaaagacccaccttctatggcatgtaccaggccaccttcagctcctaggaatgtggtttttaacatcaatgaaacagcccttattttggaatggagcccaccaagtgacacaggagggagaaaagatctcacatacagtgtaatctgtaagaaatgtggcttagacaccagccagtgtgaggactgtggtggaggactccgcttcatcccaagacatacaggcctgatcaacaattccgtgatagtacttgactttgtgtctcacgtgaattacacctttgaaatagaagcaatgaatggagtttctgagttgagtttttctcccaagccattcacagctattacagtgaccacggatcaagatggtaagttccactgctgttctctcaaaacagacccataa

SEQ ID NO: 361 - DNA, 2139 bp, Homo sapiens
atggccgcgacagaggagcggagcctgcacaacttctttgccaatcgggacaagaagaagaaggagcagagcaaccgggcggcgagttccgcgggcgcagcaggcagcgcggcgggagcagtggagctccgcattctagagggcggcggggcgggcgcagggacctggctgggcgaaggcaggaccgcgagtgcggaggctgcgggcccaggggccaccaccaaggctgtgaagaatggaaaggcttggagtaaaaagagccgcgaaggcggctactgcgctgagccgctcgctctgctggtcaagtttgggcgacccgcgcggaggagggtcgggctgactgccgccgctgagctgtccccggacgggagcgcctgtccacggcactcaccccctccagcggtggaaatgtggagaacccgagctcgctcttgcgcgcgcgcgctctctccggcccaagtgaatagtcctcgcgcaagcgggacactgtggtggatgcaattcccctcgcctccagccgcgaggagctccccggcgccgcaggcagcgtcctcctccgaagcagctgcacctgcaactgggcagcctggaccctcgtgccctgttcccgggacctcgcgcagggggcgccccgggacaccccctgcgggccgggtggaggaggaagaggaggaggaggaagaagacgtggacaaggacccccatcctacccagaacacctgcctgcgctgccgccacttctctttaagggagaggaaaagagagcctaggagaaccatggggggctgcgaagtccgggaatttcttttgcaatttggtttcttcttgcctctgctgacagcgtggccaggcgactgcagtcacgtctccaacaaccaagttgtgttgcttgatacaacaactgtactgggagagctaggatggaaaacatatccattaaatgggtgggatgccatcactgaaatggatgaacataataggcccattcacacataccaggtatgtaatgtaatggaaccaaaccaaaacaactggcttcgtacaaactggatctcccgtgatgcagctcagaaaatttatgtggaaatgaaattcacactaagggattgtaacagcatcccatgggtcttggggacttgcaaagaaacatttaatctgttttatatggaatcagatgagtcccacggaattaaattcaagccaaaccagtatacaaagatcgacacaattgctgctgatgagagttttacccagatggatttgggtgatcgcatcctcaaactcaacactgaaattcgtgaggtggggcctatagaaaggaaaggattttatctggcttttcaagacattggggcgtgcattgccctggtttcagtccgtgttttctacaagaaatgccccttcactgttcgtaacttggccatgtttcctgataccattccaagggttgattcctcctctttggttgaagtacggggttcttgtgtgaagagtgctgaagagcgtgacactcctaaactgtattgtggagctgatggagattggctggttcctcttggaaggtgcatctgcagtacaggatatgaagaaattgagggttcttgccatgcttgcagaccaggattctataaagcttttgctgggaacacaaaatgttctaaatgtcctccacacagtttaacatacatggaagcaacttctgtctgtcagtgtgaaaagggttatttccgagctgaaaaagacccaccttctatggcatgtaccaggccaccttcagctcctaggaatgtggtttttaacatcaatgaaacagcccttattttggaatggagcccaccaagtgacacaggagggagaaaagatttcacatacagtgtaatctgtaagaaatgtggcttagacaccagccagtgtgaggactgtggtggaggactccgcttcatcccaagacatacaggcctgatcaacaattccgtgatagtacttgactttgtgtctcacgtgaattacacctttgaaatagaagcaatgaatggagtttctgagttgagtttttctcccaagccattcacagctattacagtgaccacggatcaagatggtaagttccactgctgttctctcaaaacagacccataa

SEQ ID NO: 362 - DNA, 2955 bp, Homo sapiens
atggccctggattatctactactgctcctcctggcatccgcagtggctgcgatggaagaaacgttaatggacaccagaacggctactgcagagctgggctggacggccaatcctgtgtccgggtgggaagaagtcagtggctacgatgaaaacctgaacaccatccgcacctaccaggtgtgcaatgtcttcgagcccaaccagaacaattggctgctcaccaccttcatcaaccggcggggggcccatcgcatctacacagagatgcgcttcactgtgagagactgcagcagcctccctaatgtcccaggatcctgcaaggagaccttcaacttgtattactatgagactgactctgtcattgccaccaagaagtcagccttctggtctgaggccccctacctcaaagtagacaccattgctgcagatgagagcttctcccaggtggactttgggggaaggctgatgaaggtaaacacagaagtcaggagctttgggcctcttactcggaatggtttttacctcgcttttcaggattatggagcctgtatgtctcttctttctgtccgtgtcttcttcaaaaagtgtcccagcattgtgcaaaattttgcagtgtttccagagactatgacaggggcagagagcacatctctggtgattgctcggggcacatgcatccccaacgcagaggaagtggacgtgcccatcaaactctactgcaacggggatggggaatggatggtgcctattgggcgatgcacctgcaagcctggctatgagcctgagaacagcgtggcatgcaaggcttgccctgcagggacattcaaggccagccaggaagctgaaggctgctcccactgcccctccaacagccgctcccctgcagaggcgtctcccatctgcacctgtcggaccggttattaccgagcggactttgaccctccagaagtggcatgcactagcgtcccatcaggtccccgcaatgttatctccatcgtcaatgagacgtccatcattctggagtggcaccctccaagggagacaggtgggcgggatgatgtgacctacaacatcatctgcaaaaagtgccgggcagaccgccggagctgctcccgctgtgacgacaatgtggagtttgtgcccaggcagctgggcctgacggagtgccgcgtctccatcagcagcctgtgggcccacaccccctacacctttgacatccaggccatcaatggagtctccagcaagagtcccttccccccacagcacgtctctgtcaacatcaccacaaaccaagccgccccctccaccgttcccatcatgcaccaagtcagtgccactatgaggagcatcaccttgtcatggccacagccggagcagcccaatggcatcatcctggactatgagatccggtactatgagaaggaacacaatgagttcaactcctccatggccaggagtcagaccaacacagcaaggattgatgggctgcggcctggcatggtatatgtggtacaggtgcgtgcccgcactgttgctggctacggcaagttcagtggcaagatgtgcttccagactctgactgacgatgattacaagtcagagctgagggagcagctgcccctgattgctggctcggcagcggccggggtcgtgttcgttgtgtccttggtggccatctctatcgtctgtagcaggaaacgggcttatagcaaagaggctgtgtacagcgataagctccagcattacagcacaggccgaggctccccagggatgaagatctacattgaccccttcacttacgaggatcccaacgaagctgtccgggagtttgccaaggagattgatgtatcttttgtgaaaattgaagaggtcatcggagcaggggagtttggagaagtgtacaaggggcgtttgaaactgccaggcaagagggaaatctacgtggccatcaagaccctgaaggcagggtactcggagaagcagcgtcgggactttctgagtgaggcgagcatcatgggccagttcgaccatcctaacatcattcgcctggagggtgtggtcaccaagagtcggcctgtcatgatcatcacagagttcatggagaatggtgcattggattctttcctcaggcaaaatgacgggcagttcaccgtgatccagcttgtgggtatgctcaggggcatcgctgctggcatgaagtacctggctgagatgaattatgtgcatcgggacctggctgctaggaacattctggtcaacagtaacctggtgtgcaaggtgtccgactttggcctctcccgctacctccaggatgacacctcagatcccacctacaccagctccttgggagggaagatccctgtgagatggacagctccagaggccatcgcctaccgcaagttcacttcagccagcgacgtttggagctatgggatcgtcatgtgggaagtcatgtcatttggagagagaccctattgggatatgtccaaccaagatgtcatcaatgccatcgagcaggactaccggctgcccccacccatggactgtccagctgctctacaccagctcatgctggactgttggcagaaggaccggaacagccggccccggtttgcggagattgtcaacaccctagataagatgatccggaacccggcaagtctcaagactgtggcaaccatcaccgccgtgccttcccagcccctgctcgaccgctccatcccagacttcacggcctttaccaccgtggatgactggctcagcgccatcaaaatggtccagtacagggacagcttcctcactgctggcttcacctccctccagctggtcacccagatgacatcagaagacctcctgagaataggcatcaccttggcaggccatcagaagaagatcctgaacagcattcattctatgagggtccagataagtcagtcaccaacggcaatggcatga

SEQ ID NO: 363 - DNA, 2955 bp, Homo sapiens
atggccctggattatctactactgctcctcctggcatccgcagtggctgcgatggaagaaacgttaatggacaccagaacggctactgcagagctgggctggacggccaatcctgcgtccgggtgggaagaagtcagtggctacgatgaaaacctgaacaccatccgcacctaccaggtgtgcaatgtcttcgagcccaaccagaacaattggctgctcaccaccttcatcaaccggcggggggcccatcgcatctacacagagatgcgcttcactgtgagagactgcagcagcctccctaatgtcccaggatcctgcaaggagaccttcaacttgtattactatgagactgactctgtcattgccaccaagaagtcagccttctggtctgaggccccctacctcaaagtagacaccattgctgcagatgagagcttctcccaggtggactttgggggaaggctgatgaaggtaaacacagaagtcaggagctttgggcctcttactcggaatggtttttacctcgcttttcaggattatggagcctgtatgtctcttctttctgtccgtgtcttcttcaaaaagtgtcccagcattgtgcaaaattttgcagtgtttccagagactatgacaggggcagagagcacatctctggtgattgctcggggcacatgcatccccaacgcagaggaagtggacgtgcccatcaaactctactgcaacggggatggggaatggatggtgcctattgggcgatgcacctgcaagcctggctatgagcctgagaacagcgtggcatgcaaggcttgccctgcagggacattcaaggccagccaggaagctgaaggctgctcccactgcccctccaacagccgctcccctgcagaggcgtctcccatctgcacctgtcggaccggttattaccgagcggactttgaccctccagaagtggcatgcactagcgtcccatcaggtccccgcaatgttatctccatcgtcaatgagacgtccatcattctggagtggcaccctccaagggagacaggtgggcgggatgatgtgacctacaacatcatctgcaaaaagtgccgggcagaccgccggagctgctcccgctgtgacgacaatgtggagtttgtgcccaggcagctgggcctgacggagtgccgcgtctccatcagcagcctgtgggcccacaccccctacacctttgacatccaggccatcaatggagtctccagcaagagtcccttccccccacagcacgtctctgtcaacatcaccacaaaccaagccgccccctccaccgttcccatcatgcaccaagtcagtgccactatgaggagcatcaccttgtcatggccacagccggagcagcccaatggcatcatcctggactatgagatccggtactatgagaaggaacacaatgagttcaactcctccatggccaggagtcagaccaacacagcaaggattgatgggctgcggcctggcatggtatatgtggtacaggtgcgtgcccgcactgttgctggctacggcaagttcagtggcaagatgtgcttccagactctgactgacgatgattacaagtcagagctgagggagcagctgcccctgattgctggctcggcagcggccggggtcgtgttcgttgtgtccttggtggccatctctatcgtctgtagcaggaaacgggcttatagcaaagaggctgtgtacagcgataagctccagcattacagcacaggccgaggctccccagggatgaagatctacattgaccccttcacttacgaggatcccaacgaagctgtccgggagtttgccaaggagattgatgtatcttttgtgaaaattgaagaggtcatcggagcaggggagtttggagaagtgtacaaggggcgtttgaaactgccaggcaagagggaaatctacgtggccatcaagaccctgaaggcagggtactcggagaagcagcgtcgggactttctgagtgaggcgagcatcatgggccagttcgaccatcctaacatcattcgcctggagggtgtggtcaccaagagtcggcctgtcatgatcatcacagagttcatggagaatggtgcattggattctttcctcaggcaaaatgacgggcagttcaccgtgatccagcttgtgggtatgctcaggggcatcgctgctggcatgaagtacctggctgagatgaattatgtgcatcgggacctggctgctaggaacattctggtcaacagtaacctggtgtgcaaggtgtccgactttggcctctcccgctacctccaggatgacacctcagatcccacctacaccagctccttgggagggaagatccctgtgagatggacagctccagaggccatcgcctaccgcaagttcacttcagccagcgacgtttggagctatgggatcgtcatgtgggaagtcatgtcatttggagagagaccctattgggatatgtccaaccaagatgtcatcaatgccatggagcaggactaccggctgcccccacccatggactgtccagctgctctacaccagctcatgctggactgttggcagaaggaccggaacagccggccccggtttgcggagattgtcaacaccctagataagatgatccggaacccggcaagtctcaagactgtggcaaccatcaccgccgtgccttcccagcccctgctcgaccgctccatcccagacttcacggcctttaccaccgtggatgactggctcagcgccatcaaaatggtccagtacagggacagcttcctcactgctggcttcacctccctccagctggtcacccagatgacatcagaagacctcctgagaataggcatcaccttggcaggccatcagaagaagatcctgaacagcattcattctatgagggtccagataagtcagtcaccaacggcaatggcatga

SEQ ID NO: 364 - DNA, 2961 bp, Homo sapiens
atggctctgcggaggctgggggccgcgctgctgctgctgccgctgctcgccgccgtggaagaaacgctaatggactccactacagcgactgctgagctgggctggatggtgcatcctccatcagggtgggaagaggtgagtggctacgatgagaacatgaacacgatccgcacgtaccaggtgtgcaacgtgtttgagtcaagccagaacaactggctacggaccaagtttatccggcgccgtggcgtccaccgcatccacgtggagatgaagttttcggtgcgtgactgcagcagcatccccagcgtgcctggctcctgcaaggagaccttcaacctctattactatgaggctgactttgactcggccaccaagaccttccccaactggatggagaatccatgggtgaaggtggataccattgcagccgacgagagcttctcccaggtggacctgggtggccgcgtcatgaaaatcaacaccgaggtgcggagcttcggacctgtgtcccgcagcggcttctacctggccttccaggactatggcggctgcatgtccctcatcgccgtgcgtgtcttctaccgcaagtgcccccgcatcatccagaatggcgccatcttccaggaaaccctgtcgggggctgagagcacatcgctggtggctgcccggggcagctgcatcgccaatgcggaagaggtggatgtacccatcaagctctactgtaacggggacggcgagtggctggtgcccatcgggcgctgcatgtgcaaagcaggcttcgaggccgttgagaatggcaccgtctgccgaggttgtccatctgggactttcaaggccaaccaaggggatgaggcctgtacccactgtcccatcaacagccggaccacttctgaaggggccaccaactgtgtctgccgcaatggctactacagagcagacctggaccccctggacatgccctgcacaaccatcccctccgcgccccaggctgtgatttccagtgtcaatgagacctccctcatgctggagtggacccctccccgcgactccggaggccgagaggacctcgtctacaacatcatctgcaagagctgtggctcgggccggggtgcctgcacccgctgcggggacaatgtacagtacgcaccacgccagctaggcctgaccgagccacgcatttacatcagtgacctgctggcccacacccagtacaccttcgagatccaggctgtgaacggcgttactgaccagagccccttctcgcctcagttcgcctctgtgaacatcaccaccaaccaggcagctccatcggcagtgtccatcatgcatcaggtgagccgcaccgtggacagcattaccctgtcgtggtcccagccggaccagcccaatggcgtgatcctggactatgagctgcagtactatgagaaggagctcagtgagtacaacgccacagccataaaaagccccaccaacacggtcaccgtgcagggcctcaaagccggcgccatctatgtcttccaggtgcgggcacgcaccgtggcaggctacgggcgctacagcggcaagatgtacttccagaccatgacagaagccgagtaccagacaagcatccaggagaagttgccactcatcatcggctcctcggccgctggcctggtcttcctcattgctgtggttgtcatcgccatcgtgtgtaacagacgggggtttgagcgtgctgactcggagtacacggacaagctgcaacactacaccagtggccacatgaccccaggcatgaagatctacatcgatcctttcacctacgaggaccccaacgaggcagtgcgggagtttgccaaggaaattgacatctcctgtgtcaaaattgagcaggtgatcggagcaggggagtttggcgaggtctgcagtggccacctgaagctgccaggcaagagagagatctttgtggccatcaagacgctcaagtcgggctacacggagaagcagcgccgggacttcctgagcgaagcctccatcatgggccagttcgaccatcccaacgtcatccacctggagggtgtcgtgaccaagagcacacctgtgatgatcatcaccgagttcatggagaatggctccctggactcctttctccggcaaaacgatgggcagttcacagtcatccagctggtgggcatgcttcggggcatcgcagctggcatgaagtacctggcagacatgaactatgttcaccgtgacctggctgcccgcaacatcctcgtcaacagcaacctggtctgcaaggtgtcggactttgggctctcacgctttctagaggacgatacctcagaccccacctacaccagtgccctgggcggaaagatccccatccgctggacagccccggaagccatccagtaccggaagttcacctcggccagtgatgtgtggagctacggcattgtcatgtgggaggtgatgtcctatggggagcggccctactgggacatgaccaaccaggatgtaatcaatgccattgagcaggactatcggctgccaccgcccatggactgcccgagcgccctgcaccaactcatgctggactgttggcagaaggaccgcaaccaccggcccaagttcggccaaattgtcaacacgctagacaagatgatccgcaatcccaacagcctcaaagccatggcgcccctctcctctggcatcaacctgccgctgctggaccgcacgatccccgactacaccagctttaacacggtggacgagtggctggaggccatcaagatggggcagtacaaggagagcttcgccaatgccggcttcacctcctttgacgtcgtgtctcagatgatgatggaggacattctccgggttggggtcactttggctggccaccagaaaaaaatcctgaacagtatccaggtgatgcgggcgcagatgaaccagattcagtctgtggaggtttga

SEQ ID NO: 365 - DNA, 2961 bp, Homo sapiens
atggctctgcggaggctgggggccgcgctgctgctgctgccgctgctcgccgccgtggaagaaacgctaatggactccactacagcgactgctgagctgggctggatggtgcatcctccatcagggtgggaagaggtgagtggctacgatgagaacatgaacacgatccgcacgtaccaggtgtgcaacgtgtttgagtcaagccagaacaactggctacggaccaagtttatccggcgccgtggcgcccaccgcatccacgtggagatgaagttttcggtgcgtgactgcagaagcatccccagcgtgcctggctcctgcaaggagaccttcaacctctattactatgaggctgactttgactcggccaccaagaccttccccaactggatggagaatccatgggtgaaggtggataccattgcagccgacgagagcttctcccaggtggacctgggtggccgcgtcatgaaaatcaacaccgaggtgcggagcttcggacctgtgtcccgcagcggcttctacctggccttccaggactatggcggctgcatgtccctcatcgccgtgcgtgtcttctaccgcaagtgcccccgcatcatccagaatggcgccatcttccaggaaaccctgtcgggggctgagagcacatcgctggtggctgcccggggcagctgcatcgccaatgcggaagaggtggatgtacccatcaagctctactgtaacggggacggcgagtggctggtgcccatcgggcgctgcatgtgcaaagcaggcttcgaggccgttgagaatggcaccgtctgccgaggttgtccatctgggactttcaaggccaaccaaggggatgaggcctgtacccactgtcccatcaacagccggaccacttctgaaggggccaccaactgtgtctgccgcaatggctactacagagcagacctggaccccctggacatgccctgcacaaccatcccctccgcgccccaggctgtgatttccagtgtcaatgagacctccctcatgctggagtggacccctccccgcgactccggaggccgagaggacctcgtctacaacatcatctgcaagagctgtggctcgggccggggtgcctgcacccgctgcggggacaatgtacagtacgcaccacgccagctaggcctgaccgagccacgcatttacatcagtgacctgctggcccacacccagtacaccttcgagatccaggctgtgaacggcgttactgaccagagccccttctcgcctcagttcgcctctgtgaacatcaccaccaaccaggcagctccatcggcagtgtccatcatgcatcaggtgagccgcaccgtggacagcattaccctgtcgtggtcccagccggaccagcccaatggcgtgatcctggactatgagctgcagtactatgagaaggagctcagtgagtacaacgccacagccataaaaagccccaccaacacggtcaccgtgcagggcctcaaagccggcgccatctatgtcttccaggtgcgggcacgcaccgtggcaggctacgggcgctacagcggcaagatgtacttccagaccatgacagaagccgagtaccagacaagcatccaggagaagttgccactcatcatcggctcctcggccgctggcctggtcttcctcattgctgtggttgtcatcgccatcgtgtgtaacagacgggggtttgagcgtgctgactcggagtacacggacaagctgcaacactacaccagtggccacatgaccccaggcatgaagatctacatcgatcctttcacctacgaggaccccaacgaggcagtgcgggagtttgccaaggaaattgacatctcctgtgtcaaaattgagcaggtgatcggagcaggggagtttggcgaggtctgcagtggccacctgaagctgccaggcaagagagagatctttgtggccatcaagacgctcaagtcgggctacacggagaagcagcgccgggacttcctgagcgaagcctccatcatgggccagttcgaccatcccaacgtcatccacctggagggtgtcgtgaccaagagcacacctgtgatgatcatcaccgagttcatggagaatggctccctggactcctttctccggcaaaacgatgggcagttcacagtcatccagctggtgggcatgcttcggggcatcgcagctggcatgaagtacctggcagacatgaactatgttcaccgtgacctggctgcccgcaacatcctcgtcaacagcaacctggtctgcaaggtgtcggactttgggctctcacgctttctagaggacgatacctcagaccccacctacaccagtgccctgggcggaaagatccccatccgctggacagccccggaagccatccagtaccggaagttcacctcggccagtgatgtgtggagctacggcattgtcatgtgggaggtgatgtcctatggggagcggccctactgggacatgaccaaccaggatgtaatcaatgccattgagcaggactatcggctgccaccgcccatggactgcccgagcgccctgcaccaactcatgctggactgttggcagaaggaccgcaaccaccggcccaagttcggccaaattgtcaacacgctagacaagatgatccgcaatcccaacagcctcaaagccatggcgcccctctcctctggcatcaacctgccgctgctggaccgcacgatccccgactacaccagctttaacacggtggacgagtggctggaggccatcaagatggggcagtacaaggagagcttcgccaatgccggcttcacctcctttgacgtcgtgtctcagatgatgatggaggacattctccgggttggggtcactttggctggccaccagaaaaaaatcctgaacagtatccaggtgatgcgggcgcagatgaaccagattcagtctgtggaggtttga

SEQ ID NO: 366 - DNA, 2961 bp, Homo sapiens
atggctctgcggaggctgggggccgcgctgctgctgctgccgctgctcgccgccgtggaagaaacgctaatggactccactacagcgactgctgagctgggctggatggtgcatcctccatcagggtgggaagaggtgagtggctacgatgagaacatgaacacgatccgcacgtaccaggtgtgcaacgtgtttgagtcaagccagaacaactggctacggaccaagtttatccggcgccgtggcgcccaccgcatccacgtggagatgaagttttcggtgcgtgactgcagcagcatccccagcgtgcctggctcctgcaaggagaccttcaacctctattactatgaggctgactttgactcggccaccaagaccttccccaactggatggagaatccatggatgaaggtggataccattgcagccgacgagagcttctcccaggtggacctgggtggccgcgtcatgaaaatcaacaccgaggtgcggagcttcggacctgtgtcccgcagcggcttctacctggccttccaggactatggcggctgcatgtccctcatcgccgtgcgtgtcttctaccgcaagtgcccccgcatcatccagaatggcgccatcttccaggaaaccctgtcgggggctgagagcacatcgctggtggctgcccggggcagctgcatcgccaatgcggaagaggtggatgtacccatcaagctctactgtaacggggacggcgagtggctggtgcccatcgggcgctgcatgtgcaaagcaggcttcgaggccgttgagaatggcaccgtctgccgaggttgtccatctgggactttcaaggccaaccaaggggatgaggcctgtacccactgtcccatcaacagccggaccacttctgaaggggccaccaactgtgtctgccgcaatggctactacagagcagacctggaccccctggacatgccctgcacaaccatcccctccgcgccccaggctgtgatttccagtgtcaatgagacctccctcatgctggagtggacccctccccgcgactccggaggccgagaggacctcgtctacaacatcatctgcaagagctgtggctcgggccggggtgcctgcacccgctgcggggacaatgtacagtacgcaccacgccagctaggcctgaccgagccacgcatttacatcagtgacctgctggcccacacccagtacaccttcgagatccaggctgtgaacggcgttactgaccagagccccttctcgcctcagttcgcctctgtgaacatcaccaccaaccaggcagctccatcggcagtgtccatcatgcatcaggtgagccgcaccgtggacagcattaccctgtcgtggtcccagccggaccagcccaatggcgtgatcctggactatgagctgcagtactatgagaaggagctcagtgagtacaacgccacagccataaaaagccccaccaacacggtcaccgtgcagggcctcaaagccggcgccatctatgtcttccaggtgcgggcacgcaccgtggcaggctacgggcgctacagcggcaagatgtacttccagaccatgacagaagccgagtaccagacaagcatccaggagaagttgccactcatcatcggctcctcggccgctggcctggtcttcctcattgctgtggttgtcatcgccatcgtgtgtaacagacgggggtttgagcgtgctgactcggagtacacggacaagctgcaacactacaccagtggccacatgaccccaggcatgaagatctacatcgatcctttcacctacgaggaccccaacgaggcagtgcgggagtttgccaaggaaattgacatctcctgtgtcaaaattgagcaggtgatcggagcaggggagtttggcgaggtctgcagtggccacctgaagctgccaggcaagagagagatctttgtggccatcaagacgctcaagtcgggctacacggagaagcagcgccgggacttcctgagcgaagcctccatcatgggccagttcgaccatcccaacgtcatccacctggagggtgtcgtgaccaagagcacacctgtgatgatcatcaccgagttcatggagaatggctccctggactcctttctccggcaaaacgatgggcagttcacagtcatccagctggtgggcatgcttcggggcatcgcagctggcatgaagtacctggcagacatgaactatgttcaccgtgacctggctgcccgcaacatcctcgtcaacagcaacctggtctgcaaggtgtcggactttgggctctcacgctttctagaggacgatacctcagaccccacctacaccagtgccctgggcggaaagatccccatccgctggacagccccggaagccatccagtaccggaagttcacctcggccagtgatgtgtggagctacggcattgtcatgtgggaggtgatgtcctatggggagcggccctactgggacatgaccaaccaggatgtaatcaatgccattgagcaggactatcggctgccaccgcccatggactgcccgagcgccctgcaccaactcatgctggactgttggcagaaggaccgcaaccaccggcccaagttcggccaaattgtcaacacgctagacaagatgatccgcaatcccaacagcctcaaagccatggcgcccctctcctctggcatcaacctgccgctgctggaccgcacgatccccgactacaccagctttaacacggtggacgagtggctggaggccatcaagatggggcagtacaaggagagcttcgccaatgccggcttcacctcctttgacgtcgtgtctcagatgatgatggaggacattctccgggttggggtcactttggctggccaccagaaaaaaatcctgaacagtatccaggtgatgcgggcgcagatgaaccagattcagtctgtggaggtttga

SEQ ID NO: 367 - DNA, 2961 bp, Homo sapiens
atggctctgcggaggctgggggccgcgctgctgctgctgccgctgctcgccgccgtggaagaaacgctaatggactccactacagcgactgctgagctgggctggatggtgcatcctccatcagggtgggaagaggtgagtggctacgatgagaacatgaacacgatccgcacgtaccaggtgtgcaacgtgtttgagtcaagccagaacaactggctacggaccaagtttatccggcgccgtggcgcccaccgcatccacgtggagatgaagttttcggtgcgtgactgcagcagcatccccagcgtgcctggctcctgcaaggagaccttcaacctctattactatgaggctgactttgactcggccaccaagaccttccccaactggatggagaatccatgggtgaaggtggataccattgcagccgacgagagcttctcccaggtggacctgggtggccgcgtcatgaaaatcaacaccgaggtgcggagcttcggacctgtgtcccgcagcggcttctacctggccttccaggactatggcggctgcatgtccctcatcgccgtgcgtgtcttctaccgcaagtgcccccgcatcatccagaatggcgccatcttccaggaaaccctgtcgggggctgagagcacatcgctggtggctgcccggggcagctgcatcgccaatgcggaagaggtggatgtacccatcaagctctactgtaacggggacggcgagtggctggtgcccatcgggcgctgcatgtgcaaagcaggcttcgaggccgttgagaatggcaccgtctgccaaggttgtccatctgggactttcaaggccaaccaaggggatgaggcctgtacccactgtcccatcaacagccggaccacttctgaaggggccaccaactgtgtctgccgcaatggctactacagagcagacctggaccccctggacatgccctgcacaaccatcccctccgcgccccaggctgtgatttccagtgtcaatgagacctccctcatgctggagtggacccctccccgcgactccggaggccgagaggacctcgtctacaacatcatctgcaagagctgtggctcgggccggggtgcctgcacccgctgcggggacaatgtacagtacgcaccacgccagctaggcctgaccgagccacgcatttacatcagtgacctgctggcccacacccagtacaccttcgagatccaggctgtgaacggcgttactgaccagagccccttctcgcctcagttcgcctctgtgaacatcaccaccaaccaggcagctccatcggcagtgtccatcatgcatcaggtgagccgcaccgtggacagcattaccctgtcgtggtcccagccggaccagcccaatggcgtgatcctggactatgagctgcagtactatgagaaggagctcagtgagtacaacgccacagccataaaaagccccaccaacacggtcaccgtgcagggcctcaaagccggcgccatctatgtcttccaggtgcgggcacgcaccgtggcaggctacgggcgctacagcggcaagatgtacttccagaccatgacagaagccgagtaccagacaagcatccaggagaagttgccactcatcatcggctcctcggccgctggcctggtcttcctcattgctgtggttgtcatcgccatcgtgtgtaacagacgggggtttgagcgtgctgactcggagtacacggacaagctgcaacactacaccagtggccacatgaccccaggcatgaagatctacatcgatcctttcacctacgaggaccccaacgaggcagtgcgggagtttgccaaggaaattgacatctcctgtgtcaaaattgagcaggtgatcggagcaggggagtttggcgaggtctgcagtggccacctgaagctgccaggcaagagagagatctttgtggccatcaagacgctcaagtcgggctacacggagaagcagcgccgggacttcctgagcgaagcctccatcatgggccagttcgaccatcccaacgtcatccacctggagggtgtcgtgaccaagagcacacctgtgatgatcatcaccgagttcatggagaatggctccctggactcctttctccggcaaaacgatgggcagttcacagtcatccagctggtgggcatgcttcggggcatcgcagctggcatgaagtacctggcagacatgaactatgttcaccgtgacctggctgcccgcaacatcctcgtcaacagcaacctggtctgcaaggtgtcggactttgggctctcacgctttctagaggacgatacctcagaccccacctacaccagtgccctgggcggaaagatccccatccgctggacagccccggaagccatccagtaccggaagttcacctcggccagtgatgtgtggagctacggcattgtcatgtgggaggtgatgtcctatggggagcggccctactgggacatgaccaaccaggatgtaatcaatgccattgagcaggactatcggctgccaccgcccatggactgcccgagcgccctgcaccaactcatgctggactgttggcagaaggaccgcaaccaccggcccaagttcggccaaattgtcaacacgctagacaagatgatccgcaatcccaacagcctcaaagccatggcgcccctctcctctggcatcaacctgccgctgctggaccgcacgatccccgactacaccagctttaacacggtggacgagtggctggaggccatcaagatggggcagtacaaggagagcttcgccaatgccggcttcacctcctttgacgtcgtgtctcagatgatgatggaggacattctccgggttggggtcactttggctggccaccagaaaaaaatcctgaacagtatccaggtgatgcgggcgcagatgaaccagattcagtctgtggaggtttga

SEQ ID NO: 368 - DNA, 2961 bp, Homo sapiens
atggctctgcggaggctgggggccgcgctgctgctgctgccgctgctcgccgccgtggaagaaacgctaatggactccactacagcgactgctgagctgggctggatggtgcatcctccatcagggtgggaagaggtgagtggctacgatgagaacatgaacacgatccgcacgtaccaggtgtgcaacgtgtttgagtcaagccagaacaactggctacggaccaagtttatccggcgccgtggcgcccaccgcatccacgtggagatgaagttttcggtgcgtgactgcagcagcatccccagcgtgcctggctcctgcaaggagaccttcaacctctattactatgaggctgactttgactcggccaccaagaccttccccaactggatggagaatccatgggtgaaggtggataccattgcagccgacgagagcttctcccaggtggacctgggtggccgcgtcatgaaaatcaacaccgaggtgcggagcttcggacctgtgtcccgcagcggcttctacctggccttccaggactatggcggctgcatgtccctcatcgccgtgcgtgtcttctaccgcaagtgcccccgcatcatccagaatggcgccatcttccaggaaaccctgtcgggggctgagagcacatcgctggtggctgcccggggcagctgcatcgccaatgcggaagaggtggatgtacccatcaagctctactgtaacggggacggcgagtggctggtgcccatcgggcgctgcatgtgcaaagcaggcttcgaggccgttgagaatggcaccgtctgccgaggttgtctatctgggactttcaaggccaaccaaggggatgaggcctgtacccactgtcccatcaacagccggaccacttctgaaggggccaccaactgtgtctgccgcaatggctactacagagcagacctggaccccctggacatgccctgcacaaccatcccctccgcgccccaggctgtgatttccagtgtcaatgagacctccctcatgctggagtggacccctccccgcgactccggaggccgagaggacctcgtctacaacatcatctgcaagagctgtggctcgggccggggtgcctgcacccgctgcggggacaatgtacagtacgcaccacgccagctaggcctgaccgagccacgcatttacatcagtgacctgctggcccacacccagtacaccttcgagatccaggctgtgaacggcgttactgaccagagccccttctcgcctcagttcgcctctgtgaacatcaccaccaaccaggcagctccatcggcagtgtccatcatgcatcaggtgagccgcaccgtggacagcattaccctgtcgtggtcccagccggaccagcccaatggcgtgatcctggactatgagctgcagtactatgagaaggagctcagtgagtacaacgccacagccataaaaagccccaccaacacggtcaccgtgcagggcctcaaagccggcgccatctatgtcttccaggtgcgggcacgcaccgtggcaggctacgggcgctacagcggcaagatgtacttccagaccatgacagaagccgagtaccagacaagcatccaggagaagttgccactcatcatcggctcctcggccgctggcctggtcttcctcattgctgtggttgtcatcgccatcgtgtgtaacagacgggggtttgagcgtgctgactcggagtacacggacaagctgcaacactacaccagtggccacatgaccccaggcatgaagatctacatcgatcctttcacctacgaggaccccaacgaggcagtgcgggagtttgccaaggaaattgacatctcctgtgtcaaaattgagcaggtgatcggagcaggggagtttggcgaggtctgcagtggccacctgaagctgccaggcaagagagagatctttgtggccatcaagacgctcaagtcgggctacacggagaagcagcgccgggacttcctgagcgaagcctccatcatgggccagttcgaccatcccaacgtcatccacctggagggtgtcgtgaccaagagcacacctgtgatgatcatcaccgagttcatggagaatggctccctggactcctttctccggcaaaacgatgggcagttcacagtcatccagctggtgggcatgcttcggggcatcgcagctggcatgaagtacctggcagacatgaactatgttcaccgtgacctggctgcccgcaacatcctcgtcaacagcaacctggtctgcaaggtgtcggactttgggctctcacgctttctagaggacgatacctcagaccccacctacaccagtgccctgggcggaaagatccccatccgctggacagccccggaagccatccagtaccggaagttcacctcggccagtgatgtgtggagctacggcattgtcatgtgggaggtgatgtcctatggggagcggccctactgggacatgaccaaccaggatgtaatcaatgccattgagcaggactatcggctgccaccgcccatggactgcccgagcgccctgcaccaactcatgctggactgttggcagaaggaccgcaaccaccggcccaagttcggccaaattgtcaacacgctagacaagatgatccgcaatcccaacagcctcaaagccatggcgcccctctcctctggcatcaacctgccgctgctggaccgcacgatccccgactacaccagctttaacacggtggacgagtggctggaggccatcaagatggggcagtacaaggagagcttcgccaatgccggcttcacctcctttgacgtcgtgtctcagatgatgatggaggacattctccgggttggggtcactttggctggccaccagaaaaaaatcctgaacagtatccaggtgatgcgggcgcagatgaaccagattcagtctgtggaggtttga

SEQ ID NO: 369 - DNA, 2961 bp, Homo sapiens
atggctctgcggaggctgggggccgcgctgctgctgctgccgctgctcgccgccgtggaagaaacgctaatggactccactacagcgactgctgagctgggctggatggtgcatcctccatcagggtgggaagaggtgagtggctacgatgagaacatgaacacgatccgcacgtaccaggtgtgcaacgtgtttgagtcaagccagaacaactggctacggaccaagtttatccggcgccgtggcgcccaccgcatccacgtggagatgaagttttcggtgcgtgactgcagcagcatccccagcgtgcctggctcctgcaaggagaccttcaacctctattactatgaggctgactttgactcggccaccaagaccttccccaactggatggagaatccatgggtgaaggtggataccattgcagccgacgagagcttctcccaggtggacctgggtggccgcgtcatgaaaatcaacaccgaggtgcggagcttcggacctgtgtcccgcagcggcttctacctggccttccaggactatggcggctgcatgtccctcatcgccgtgcgtgtcttctaccgcaagtgcccccgcatcatccagaatggcgccatcttccaggaaaccctgtcgggggctgagagcacatcgctggtggctgcccggggcagctgcatcgccaatgcggaagaggtggatgtacccatcaagctctactgtaacggggacggcgagtggctggtgcccatcgggcgctgcatgtgcaaagcaggcttcgaggccgttgagaatggcaccgtctgccgaggttgtccatctgggactttcaaggccaaccaaggggatgaggcctgtacccactgtcccatcaacagccggaccacttctgaaggggccaccaactgtgtctgccgcaatggctactacagagcagacctggaccccctggacatgccctgcacaaccatcccctccgcgccccaggctgtgatttccagtgtcaatgagacctccctcatgctggagtggacccctccccgcgactccggaggccgagaggacctcgtctacaacatcatctgcaagagctgtggctcgggccagggtgcctgcacccgctgcggggacaatgtacagtacgcaccacgccagctaggcctgaccgagccacgcatttacatcagtgacctgctggcccacacccagtacaccttcgagatccaggctgtgaacggcgttactgaccagagccccttctcgcctcagttcgcctctgtgaacatcaccaccaaccaggcagctccatcggcagtgtccatcatgcatcaggtgagccgcaccgtggacagcattaccctgtcgtggtcccagccggaccagcccaatggcgtgatcctggactatgagctgcagtactatgagaaggagctcagtgagtacaacgccacagccataaaaagccccaccaacacggtcaccgtgcagggcctcaaagccggcgccatctatgtcttccaggtgcgggcacgcaccgtggcaggctacgggcgctacagcggcaagatgtacttccagaccatgacagaagccgagtaccagacaagcatccaggagaagttgccactcatcatcggctcctcggccgctggcctggtcttcctcattgctgtggttgtcatcgccatcgtgtgtaacagacgggggtttgagcgtgctgactcggagtacacggacaagctgcaacactacaccagtggccacatgaccccaggcatgaagatctacatcgatcctttcacctacgaggaccccaacgaggcagtgcgggagtttgccaaggaaattgacatctcctgtgtcaaaattgagcaggtgatcggagcaggggagtttggcgaggtctgcagtggccacctgaagctgccaggcaagagagagatctttgtggccatcaagacgctcaagtcgggctacacggagaagcagcgccgggacttcctgagcgaagcctccatcatgggccagttcgaccatcccaacgtcatccacctggagggtgtcgtgaccaagagcacacctgtgatgatcatcaccgagttcatggagaatggctccctggactcctttctccggcaaaacgatgggcagttcacagtcatccagctggtgggcatgcttcggggcatcgcagctggcatgaagtacctggcagacatgaactatgttcaccgtgacctggctgcccgcaacatcctcgtcaacagcaacctggtctgcaaggtgtcggactttgggctctcacgctttctagaggacgatacctcagaccccacctacaccagtgccctgggcggaaagatccccatccgctggacagccccggaagccatccagtaccggaagttcacctcggccagtgatgtgtggagctacggcattgtcatgtgggaggtgatgtcctatggggagcggccctactgggacatgaccaaccaggatgtaatcaatgccattgagcaggactatcggctgccaccgcccatggactgcccgagcgccctgcaccaactcatgctggactgttggcagaaggaccgcaaccaccggcccaagttcggccaaattgtcaacacgctagacaagatgatccgcaatcccaacagcctcaaagccatggcgcccctctcctctggcatcaacctgccgctgctggaccgcacgatccccgactacaccagctttaacacggtggacgagtggctggaggccatcaagatggggcagtacaaggagagcttcgccaatgccggcttcacctcctttgacgtcgtgtctcagatgatgatggaggacattctccgggttggggtcactttggctggccaccagaaaaaaatcctgaacagtatccaggtgatgcgggcgcagatgaaccagattcagtctgtggaggtttga

SEQ ID NO: 370 - DNA, 2961 bp, Homo sapiens
atggctctgcggaggctgggggccgcgctgctgctgctgccgctgctcgccgccgtggaagaaacgctaatggactccactacagcgactgctgagctgggctggatggtgcatcctccatcagggtgggaagaggtgagtggctacgatgagaacatgaacacgatccgcacgtaccaggtgtgcaacgtgtttgagtcaagccagaacaactggctacggaccaagtttatccggcgccgtggcgcccaccgcatccacgtggagatgaagttttcggtgcgtgactgcagcagcatccccagcgtgcctggctcctgcaaggagaccttcaacctctattactatgaggctgactttgactcggccaccaagaccttccccaactggatggagaatccatgggtgaaggtggataccattgcagccgacgagagcttctcccaggtggacctgggtggccgcgtcatgaaaatcaacaccgaggtgcggagcttcggacctgtgtcccgcagcggcttctacctggccttccaggactatggcggctgcatgtccctcatcgccgtgcgtgtcttctaccgcaagtgcccccgcatcatccagaatggcgccatcttccaggaaaccctgtcgggggctgagagcacatcgctggtggctgcccggggcagctgcatcgccaatgcggaagaggtggatgtacccatcaagctctactgtaacggggacggcgagtggctggtgcccatcgggcgctgcatgtgcaaagcaggcttcgaggccgttgagaatggcaccgtctgccgaggttgtccatctgggactttcaaggccaaccaaggggatgaggcctgtacccactgtcccatcaacagccggaccacttctgaaggggccaccaactgtgtctgccgcaatggctactacagagcagacctggaccccctggacatgccctgcacaaccatcccctccgcgccccaggctgtgatttccagtgtcaatgagacctccctcatgctggagtggacccctccccgcgactccggaggccgagaggacctcgtctacaacatcatctgcaagagctgtggctcgggccggggtgcctgcacccgctgcggggacaatgtacagtacgcaccacgccagctaggcctgaccgagccacgcatttacatcagtgacctgctggcccacacccagtacaccttcgagatccaggctgtgaacggcgttactgaccagagccccttctcgcctcagttcgcctctgtgaacatcaccaccaaccaggcagctccatcggcagtgtccatcatgcatcaggtgagccgcaccgtggacagcattaccctgtcgtggtcccagccggaccagcccaatggcgtgatcctggactatgagctgcagtactatgagaaggagctcagtgagtacaacgccacagccataaaaagccccaccaacacggtcaccgtgcagggcctcaaagccggcgccatctatgtcttccaggtgcgggcacgcaccgtggcaggctacgggcgctacagcggcaagatgtacttccagaccatgacagaagccgagtaccagacaagcatccaggagaagttgccactcatcatcggctcctcggccgctggcctggtcttcctcattgctgtggttgtcatcgccatcgtgtgtaacagacgggggtttgagcgtgctgactcggagtacacggacaagctgcaacactacaccagtggccacatgaccccaggcatgaagatctacatcgatcctttcacctacgaggaccccaacgaggcagtgcgggagtttgccaaggaaattgacatctcctgtgtcaaaattgagcaggtgatcggagcaggggagtttggcgaggtctgcagtggccacctgaagctgccaggcaagagagagatctttgtggccatcaagacgctcaagtcgggctacacggagaagcagcgccgggacttcctgagcgaagcctccatcatgggccagttcgaccatcccaacgtcatccacctgaagggtgtcgtgaccaagagcacacctgtgatgatcatcaccgagttcatggagaatggctccctggactcctttctccggcaaaacgatgggcagttcacagtcatccagctggtgggcatgcttcggggcatcgcagctggcatgaagtacctggcagacatgaactatgttcaccgtgacctggctgcccgcaacatcctcgtcaacagcaacctggtctgcaaggtgtcggactttgggctctcacgctttctagaggacgatacctcagaccccacctacaccagtgccctgggcggaaagatccccatccgctggacagccccggaagccatccagtaccggaagttcacctcggccagtgatgtgtggagctacggcattgtcatgtgggaggtgatgtcctatggggagcggccctactgggacatgaccaaccaggatgtaatcaatgccattgagcaggactatcggctgccaccgcccatggactgcccgagcgccctgcaccaactcatgctggactgttggcagaaggaccgcaaccaccggcccaagttcggccaaattgtcaacacgctagacaagatgatccgcaatcccaacagcctcaaagccatggcgcccctctcctctggcatcaacctgccgctgctggaccgcacgatccccgactacaccagctttaacacggtggacgagtggctggaggccatcaagatggggcagtacaaggagagcttcgccaatgccggcttcacctcctttgacgtcgtgtctcagatgatgatggaggacattctccgggttggggtcactttggctggccaccagaaaaaaatcctgaacagtatccaggtgatgcgggcgcagatgaaccagattcagtctgtggaggtttga

SEQ ID NO: 371 - DNA, 2961 bp, Homo sapiens
atggctctgcggaggctgggggccgcgctgctgctgctgccgctgctcgccgccgtggaagaaacgctaatggactccactacagcgactgctgagctgggctggatggtgcatcctccatcagggtgggaagaggtgagtggctacgatgagaacatgaacacgatccgcacgtaccaggtgtgcaacgtgtttgagtcaagccagaacaactggctacggaccaagtttatccggcgccgtggcgcccaccgcatccacgtggagatgaagttttcggtgcgtgactgcagcagcatccccagcgtgcctggctcctgcaaggagaccttcaacctctattactatgaggctgactttgactcggccaccaagaccttccccaactggatggagaatccatgggtgaaggtggataccattgcagccgacgagagcttctcccaggtggacctgggtggccgcgtcatgaaaatcaacaccgaggtgcggagcttcggacctgtgtcccgcagcggcttctacctggccttccaggactatggcggctgcatgtccctcatcgccgtgcgtgtcttctaccgcaagtgcccccgcatcatccagaatggcgccatcttccaggaaaccctgtcgggggctgagagcacatcgctggtggctgcccggggcagctgcatcgccaatgcggaagaggtggatgtacccatcaagctctactgtaacggggacggcgagtggctggtgcccatcgggcgctgcatgtgcaaagcaggcttcgaggccgttgagaatggcaccgtctgccgaggttgtccatctgggactttcaaggccaaccaaggggatgaggcctgtacccactgtcccatcaacagccggaccacttctgaaggggccaccaactgtgtctgccgcaatggctactacagagcagacctggaccccctggacatgccctgcacaaccatcccctccgcgccccaggctgtgatttccagtgtcaatgagacctccctcatgctggagtggacccctccccgcgactccggaggccgagaggacctcgtctacaacatcatctgcaagagctgtggctcgggccggggtgcctgcacccgctgcggggacaatgtacagtacgcaccacgccagctaggcctgaccgagccacgcatttacatcagtgacctgctggcccacacccagtacaccttcgagatccaggctgtgaacggcgttactgaccagagccccttctcgcctcagttcgcctctgtgaacatcaccaccaaccaggcagctccatcggcagtgtccatcatgcatcaggtgagccgcaccgtggacagcattaccctgtcgtggtcccagccggaccagcccaatggcgtgatcctggactatgagctgcagtactatgagaaggagctcagtgagtacaacgccacagccataaaaagccccaccaacacggtcaccgtgcagggcctcaaagccggcgccatctatgtcttccaggtgcgggcacgcaccgtggcaggctacgggcgctacagcggcaagatgtacttccagaccatgacagaagccgagtaccagacaagcatccaggagaagttgccactcatcatcggctcctcggccgctggcctggtcttcctcattgctgtggttgtcatcgccatcgtgtgtaacagacgggggtttgagcgtgctgactcggagtacacggacaagctgcaacactacaccagtggccacatgaccccaggcatgaagatctacatcgatcctttcacctacgaggaccccaacgaggcagtgcgggagtttgccaaggaaattgacatctcctgtgtcaaaattgagcaggtgatcggagcaggggagtttggcgaggtctgcagtggccacctgaagctgccaggcaagagagagatctttgtggccatcaagacgctcaagtcgggctacacggagaagcagcgccgggacttcctgagcgaagcctccatcatgggccagttcgaccatcccaacgtcatccacctggagggtgtcgtgaccaagagcacacctgtgatgatcatcaccgagttcatggagaatggctccctggactcctttctccggcaaaacgatgggcagttcacagtcatccagctggtgggcatgcttcggggcatcgcagctggcatgaagtacctggcagacatgaactatgttcaccgtgacctggctgcccgcaacatcctcgtcaacagcaacctggtctgcaagttgtcggactttgggctctcacgctttctagaggacgatacctcagaccccacctacaccagtgccctgggcggaaagatccccatccgctggacagccccggaagccatccagtaccggaagttcacctcggccagtgatgtgtggagctacggcattgtcatgtgggaggtgatgtcctatggggagcggccctactgggacatgaccaaccaggatgtaatcaatgccattgagcaggactatcggctgccaccgcccatggactgcccgagcgccctgcaccaactcatgctggactgttggcagaaggaccgcaaccaccggcccaagttcggccaaattgtcaacacgctagacaagatgatccgcaatcccaacagcctcaaagccatggcgcccctctcctctggcatcaacctgccgctgctggaccgcacgatccccgactacaccagctttaacacggtggacgagtggctggaggccatcaagatggggcagtacaaggagagcttcgccaatgccggcttcacctcctttgacgtcgtgtctcagatgatgatggaggacattctccgggttggggtcactttggctggccaccagaaaaaaatcctgaacagtatccaggtgatgcgggcgcagatgaaccagattcagtctgtggaggtttga

SEQ ID NO: 372 - DNA, 2994 bp, Homo sapiens
atggccagagcccgcccgccgccgccgtcgccgccgccggggcttctgccgctgctccctccgctgctgctgctgccgctgctgctgctgcccgccggctgccgggcgctggaagagaccctcatggacacaaaatgggtaacatctgagttggcgtggacatctcatccagaaagtgggtgggaagaggtgagtggctacgatgaggccatgaatcccatccgcacataccaggtgtgtaatgtgcgcgagtcaagccagaacaactggcttcgcacggggttcatctggcggcgggatgtgcagcgggtctacgtggagctcaagttcactgtgcgtgactgcaacagcatccccaacatccccggctcctgcaaggagaccttcaacctcttctactacgaggctgacagcgatgtggcctcagcctcctcccccttctggatggagaacccctacgtgaaagtggacaccattgcacccgatgagagcttctcgcggctggatgccggccgtgtcaacaccaaggtgcgcagctttgggccactttccaaggctggcttctacctggccttccaggaccagggcgcctgcatgtcgctcatctccgtgcgcgccttctacaagaagtgtgcatccaccaccgcaggcttcgcactcttccccgagaccctcactggggcggagcccacctcgctggtcattgctcctggcacctgcatccctaacgccgtggaggtgtcggtgccactcaagctctactgcaacggcgatggggagtggatggtgcctgtgggtgcctgcacctgtgccaccggccatgagccagctgccaaggagtcccagtgccgcccctgtccccctgggagctacaaggcgaagcagggagaggggccctgcctcccatgtccccccaacagccgtaccacctccccagccgccagcatctgcacctgccacaataacttctaccgtgcagactcggactctgcggacagtgcctgtaccaccgtgccatctccaccccgaggtgtgatctccaatgtgaatgaaacctcactgatcctcgagtggagtgagccccgggacctgggtggccgggatgacctcctgtacaatgtcatctgcaagaagtgccatggggctggaggggcctcagcctgctcacgctgtgatgacaacgtggagtttgtgcctcggcagctgggcctgacggagcgccgggtccacatcagccatctgctggcccacacgcgctacacctttgaggtgcaggcggtcaacggtgtctcgggcaagagccctctgccgcctcgttatgcggccgtgaatatcaccacaaaccaggctgccccgtctgaagtgcccacactacgcctgcacagcagctcaggcagcagcctcaccctatcctgggcacccccagagcggcccaacggagtcatcctggactacgagatgaagtactttgagaagagcgagggcatcgcctccacagtgaccagccagatgaactccgtgcagctggacgggcttcggcctgacgcccgctatgtggtccaggtccgtgcccgcacagtagctggctatgggcagtacagccgccctgccgagtttgagaccacaagtgagagaggctctggggcccagcagctccaggagcagcttcccctcatcgtgggctccgctacagctgggcttgtcttcgtggtggctgtcgtggtcatcgctatcgtctgcctcaggaagcagcgacacggctctgattcggagtacacggagaagctgcagcagtacattgctcctggaatgaaggtttatattgacccttttacctacgaggaccctaatgaggctgttcgggagtttgccaaggagatcgacgtgtcctgcgtcaagatcgaggaggtgatcggagctggggaatttggggaagtgtgccgtggtcgactgaaacagcctggccgccgagaggtgtttgtggccatcaagacgctgaaggtgggctacaccgagaggcagcggcgggacttcctaagcgaggcctccatcatgggtcagtttgatcaccccaatataatccggctcgagggcgtggtcaccaaaagtcggccagttatgatcctcactgagttcatggaaaactgcgccctggactccttcctccggctcaacgatgggcagttcacggtcatccagctggtgggcatgttgcggggcattgctgccggcatgaagtacctgtccgagatgaactatgtgcaccgcgacctggctgctcgcaacatccttgtcaacagcaacctggtctgcaaagtctcagactttggcctctcccgcttcctggaggatgacccctccgatcctacctacaccagttccctgggcgggaagatccccatccgctggactgccccagaggccatagcctatcggaagttcacttctgctagtgatgtctggagctacggaattgtcatgtgggaggtcatgagctatggagagcgaccctactgggacatgagcaaccaggatgtcatcaatgccgtggagcaggattaccggctgccaccacccatggactgtcccacagcactgcaccagctcatgctggactgctgggtgcgggaccggaacctcaggcccaaattctcccagattgtcaataccctggacaagctcatccgcaatgctgccagcctcaaggtcattgccagcgctcagtctggcatgtcacagcccctcctggaccgcacggtcccagattacacaaccttcacgacagttggtgattggctggatgccatcaagatggggcggtacaaggagagcttcgtcagtgcggggtttgcatcttttgacctggtggcccagatgacggcagaagacctgctccgtattggggtcaccctggccggccaccagaagaagatcctgagcagtatccaggacatgcggctgcagatgaaccagacgctgcctgtgcaggtctga

SEQ ID NO: 373 - DNA, 2997 bp, Homo sapiens
atggccagagcccgcccgccgccgccgccgtcgccgccgccggggcttctgccgctgctccctccgctgctgctgctgccgctgctgctgctgcccgccggctgccgggcgctggaagagaccctcatggacacaaaatgggtaacatctgagttggcgtggacatctcatccagaaagtgggtgggaagaggtgagtggctacgatgaggccatgaatcccatccgcacataccaggtgtgtaatgtgcgcgagtcaagccagaacaactggcttcgcacggggttcatctggcggcgggatgtgcagcgggtctacgtggagctcaagttcactgtgcgtgactgcaacagcatccccaacatccccggctcctgcaaggagaccttcaacctcttctactacgaggctgacagcgatgtggcctcagcctcctcccccttctggatggagaacccctacgtgaaagtggacaccattgcacccgatgagagcttctcgcggctggatgccggccgtgtcaacaccaaggtgcgcagctttgggccactttccaaggctggcttctacctggccttccaggaccagggcgcctgcatgtcgctcatctccgtgcgcgccttctacaagaagtgtgcatccaccaccgcaggcttcgcactcttccccgagaccctcactggggcggagcccacctcgctggtcattgctcctggcacctgcatccctaacgccgtggaggtgtcggtgccactcaagctctactgcaacggcgatggggagtggatggtgcctgtgggtgcctgcacctgtgccaccggccatgagccagctgccaaggagtcccagtgccgcccctgtccccctgggagctacaaggcgaagcagggagaggggccctgcctcccatgtccccccaacagccgtaccacctccccagccgccagcatctgcacctgccacaataacttctaccgtgcagactcggactctgcggacagtgcctgtaccaccgtgccatctccaccccgaggtgtgatctccaatgtgaatgaaacctcactgatcctcgagtggagtgagccccgggacctgggtggccgggatgacctcctgtacaatgtcatctgcaagaagtgccatggggctggaggggcctcagcctgctcacgctgtgatgacaacgtggagtttgtgcctcggcagctgggcctgacggagcgccgggtccacatcagccatctgctggcccacacgcgctacacctttgaggtgcaggcggtcaacggtgtctcgggcaagagccctctgccgcctcgttatgcggccgtgaatatcaccacaaaccaggctgccccgtctgaagtgcccacactacgcctgcacagcagctcaggcagcagcctcaccctatcctgggcacccccagagcggcccaacggagtcatcctggactacgagatgaagtactttgagaagagcgagggcatcgcctccacagtgaccagccagatgaactccgtgcagctggacgggcttcggcctgacgtccgctatgtggtccaggtccgtgcccgcacagtagctggctatgggcagtacagccgccctgccgagtttgagaccacaagtgagagaggctctggggcccagcagctccaggagcagcttcccctcatcgtgggctccgctacagctgggcttgtcttcgtggtggctgtcgtggtcatcgctatcgtctgcctcaggaagcagcgacacggctctgattcggagtacacggagaagctgcagcagtacattgctcctggaatgaaggtttatattgacccttttacctacgaggaccctaatgaggctgttcgggagtttgccaaggagatcgacgtgtcctgcgtcaagatcgaggaggtgatcggagctggggaatttggggaagtgtgccgtggtcgactgaaacagcctggccgccgagaggtgtttgtggccatcaagacgctgaaggtgggctacaccgagaggcagcggcgggacttcctaagcgaggcctccatcatgggtcagtttgatcaccccaatataatccggctcgagggcgtggtcaccaaaagtcggccagttatgatcctcactgagttcatggaaaactgcgccctggactccttcctccggctcaacgatgggcagttcacggtcatccagctggtgggcatgttgcggggcattgctgccggcatgaagtacctgtccgagatgaactatgtgcaccgcgacctggctgctcgcaacatccttgtcaacagcaacctggtctgcaaagtctcagactttggcctctcccgcttcctggaggatgacccctccgatcctacctacaccagttccctgggcgggaagatccccatccgctggactgccccagaggccatagcctatcggaagttcacttctgctagtgatgtctggagctacggaattgtcatgtgggaggtcatgagctatggagagcgaccctactgggacatgagcaaccaggatgtcatcaatgccgtggagcaggattaccggctgccaccacccatggactgtcccacagcactgcaccagctcatgctggactgctgggtgcgggaccggaacctcaggcccaaattctcccagattgtcaataccctggacaagctcatccgcaatgctgccagcctcaaggtcattgccagcgctcagtctggcatgtcacagcccctcctggaccgcacggtcccagattacacaaccttcacgacagttggtgattggctggatgccatcaagatggggcggtacaaggagagcttcgtcagtgcggggtttgcatcttttgacctggtggcccagatgacggcagaagacctgctccgtattggggtcaccctggccggccaccagaagaagatcctgagcagtatccaggacatgcggctgcagatgaaccagacgctgcctgtgcaggtctga

SEQ ID NO: 374 - DNA, 2964 bp, Homo sapiens
atggagctccgggtgctgctctgctgggcttcgttggccgcagctttggaagagaccctgctgaacacaaaattggaaactgctgatctgaagtgggtgacattccctcaggtggacgggcagtgggaggaactgagcggcctggatgaggaacagcacagcgtgcgcacctacgaagtgtgtgacgtgcagcgtgccccgggccaggcccactggcttcgcacaggttgggtcccacggcggggcgccgtccacgtgtacgccacgctgcgcttcaccatgctcgagtgcctgtccctgcctcgggctgggcgctcctgcaaggagaccttcaccgtcttctactatgagagcgatgcggacacggccacggccctcacgccagcctggatggagaacccctacatcaaggtggacacggtggccgcggagcatctcacccggaagcgccctggggccgaggccaccgggaaggtgaatgtcaagacgctgcgtctgggaccgctcagcaaggctggcttctacctggccttccaggaccagggtgcctgcatggccctgctatccctgcacctcttctacaaaaagtgcgcccagctgactgtgaacctgactcgattcccggagactgtgcctcgggagctggttgtgcccgtggccggtagctgcgtggtggatgccgtccccgcctctggccccagccccagcctctactgccgtgaggatggccagtgggccgaacagccggtcacgggctgcagctgtgctccggggttcgaggcagctgaggggaacaccaagtgccgagcctgtgcccagggcaccttcaagcccctgtcaggagaagggtcctgccagccatgcccagccaatagccactctaacaccattggatcagccgtctgccagtgccgcgtcgggtacttccgggcacgcacagacccccggggtgcaccctgcaccacccctccttcggctccgcggagcgtggtttcccgcctgaacggctcctccctgcacctggaatggagtgcccccctggagtctggtggccgagaggacctcacctacgccctccgctgccgggagtgccgacccggaggctcctgtgcgccctgcgggggagacctgacttttgaccccggcccccgggacctggtggagccctgggtggtggttcgagggctacgtcctgacttcacctatacctttgaggtcactgcattgaacggggtatcctccttagccacggggcccgtcccatttgagcctgtcaatgtcaccactgaccgagaggtacctcctgcagtgtctgacatccgggtgacgcggtcctcacccagcagcttgagcctggcctgggctgttccccgggcacccagtggggctgtgctggactacgaggtcaaataccatgagaagggcgccgagggtcccagcagcgtgcggttcctgaagacgtcagaaaaccgggcagagctgcgggggctgaagcggggagccagctacctggtgcaggtacgggcgcgctctgaggccggctacgggcccttcggccaggaacatcacagccagacccaactggatgagagcgagggctggcgggagcagctggccctgattgcgggcacggcagtcgtgggtgtggtcctggtcctggtggtcattgtggtcgcagttctctgcctcaggaagcagagcaatgggagagaagcagaatattcggacaaacacggacagtatctcatcggacatggtactaaggtctacatcgaccccttcacttatgaagaccctaatgaggctgtgagggaatttgcaaaagagatcgatgtctcctacgtcaagattgaagaggtgattggtgcaggtgagtttggcgaggtgtgccgggggcggctcaaggccccagggaagaaggagagctgtgtggcaatcaagaccctgaagggtggctacacggagcggcagcggcgtgagtttctgagcgaggcctccatcatgggccagttcgagcaccccaatatcatccgcctggagggcgtggtcaccaacagcatgcccgtcatgattctcacagagttcatggagaacggcgccctggactccttcctgcggctaaacgacggacagttcacagtcatccagctcgtgggcatgctgcggggcatcgcctcgggcatgcggtaccttgccgagatgagctacgtccaccgagacctggctgctcgcaacatcctagtcaacagcaacctcgtctgcaaagtgtctgactttggcctttcccgattcctggaggagaactcttccgatcccacctacacgagctccctgggaggaaagattcccatccgatggactgccccggaggccattgccttccggaagttcacttccgccagtgatgcctggagttacgggattgtgatgtgggaggtgatgtcatttggggagaggccgtactgggacatgagcaatcaggacgtgatcaatgccattgaacaggactaccggctgcccccgcccccagactgtcccacctccctccaccagctcatgctggactgttggcagaaagaccggaatgcccggccccgcttcccccaggtggtcagcgccctggacaagatgatccggaaccccgccagcctcaaaatcgtggcccgggagaatggcggggcctcacaccctctcctggaccagcggcagcctcactactcagcttttggctctgtgggcgagtggcttcgggccatcaaaatgggaagatacgaagaaagtttcgcagccgctggctttggctccttcgagctggtcagccagatctctgctgaggacctgctccgaatcggagtcactctggcgggacaccagaagaaaatcttggccagtgtccagcacatgaagtcccaggccaagccgggaaccccgggtgggacaggaggaccggccccgcagtactga

SEQ ID NO: 375 - DNA, 2964 bp, Homo sapiens
atggagctccgggtgctgctctgctgggcttcgttggccgcagctttggaagagaccctgctgaacacaaaattggaaactgctgatctgaagtgggtgacattccctcaggtggacgggcagtgggaggaactgagcggcctggatgaggaacagcacagcgtgcgcacctacgaagtgtgtgacgtgcagcgtgccccgggccaggcccactggcttcgcacaggttgggtcccacggcggggcgccgtccacgtgtacgccacgctgcgcttcaccatgctcgagtgcctgtccctgcctcgggctgggcgctcctgcaaggagaccttcaccgtcttctactatgagagcgatgcggacacggccacggccctcacgccagcctggatggagaacccctacatcaaggtggacacggtggccgcggagcatctcacccggaagcgccctggggccgaggccaccgggaaggtgaatgtcaagacgctgcgtctgggaccgctcagcaaggctggcttctacctggccttccaggaccagggtgcctgcatggccctgctatccctgcacctcttctacaaaaagtgcgcccagctgactgtgaacctgactcgattcccggagactgtgcctcgggagctggttgtgcccgtggccggtagctgcgtggtggatgccgtccccgcccctggccccagccccagcctctactgccgtgaggatggccagtgggccgaacagccggtcacgggctgcagctgtgctccggggttcgaggcagctgaggggaacaccaagtgccgagcctgtgcccagggcaccttcaagcccctgtcaggagaagggtcctgccagccatgcccagccaatagccactctaacaccattggatcagccgtctgccagtgccgcgtcgggtacttccgggcacgcacagacccccggggtgcaccctgcaccacccctccttcggctccgcggagcgtggtttcccgcctgaacggctcctccctgcacctggaatggagtgcccccctggagtctggtggccgagaggacctcacctacgccctccgctgccgggagtgccgacccggaggctcctgtgcgccctgcgggggagacctgacttttgaccccggcccccgggacctggtggagccctgggtggtggttcgagggctacgtcctgacttcacctatacctttgaggtcactgcattgaacggggtatcctccttagccacggggcccgtcccatttgagcctgtcaatgtcaccactgaccgagaggtacctcctgcagtgtctgacatccgggtgacgcggtcctcacccagcagcttgagcctggcctgggctgttccccgggcacccagtggggctgtgctggactacgaggtcaaataccatgagaagggcgccgagggtcccagcagcgtgcggttcctgaagacgtcagaaaaccgggcagagctgcgggggctgaagcggggagccagctacctggtgcaggtacgggcgcgctctgaggccggctacgggcccttcggccaggaacatcacagccagacccaactggatgagagcgagggctggcgggagcagctggccctgattgcgggcacggcagtcatgggtgtggtcctggtcctggtggtcattgtggtcgcagttctctgcctcaggaagcagagcaatgggagagaagcagaatattcggacaaacacggacagtatctcatcggacatggtactaaggtctacatcgaccccttcacttatgaagaccctaatgaggctgtgagggaatttgcaaaagagatcgatgtctcctacgtcaagattgaagaggtgattggtgcaggtgagtttggcgaggtgtgccgggggcggctcaaggccccagggaagaaggagagctgtgtggcaatcaagaccctgaagggtggctacacggagcggcagcggcgtgagtttctgagcgaggcctccatcatgggccagttcgagcaccccaatatcatccgcctggagggcgtggtcaccaacagcatgcccgtcatgattctcacagagttcatggagaacggcgccctggactccttcctgcggctaaacgacggacagttcacagtcatccagctcgtgggcatgctgcggggcatcgcctcgggcatgcggtaccttgccgagatgagctacgtccaccgagacctggctgctcgcaacatcctagtcaacagcaacctcgtctgcaaagtgtctgactttggcctttcccgattcctggaggagaactcttccgatcccacctacacgagctccctgggaggaaagattcccatccgatggactgccccggaggccattgccttccggaagttcacttccgccagtgatgcctggagttacgggattgtgatgtgggaggtgatgtcatttggggagaggccgtactgggacatgagcaatcaggacgtgatcaatgccattgaacaggactaccggctgcccccgcccccagactgtcccacctccctccaccagctcatgctggactgttggcagaaagaccggaatgcccggccccgcttcccccaggtggtcagcgccctggacaagatgatccggaaccccgccagcctcaaaatcgtggcccgggagaatggcggggcctcacaccctctcctggaccagcggcagcctcactactcagcttttggctctgtgggcgagtggcttcgggccatcaaaatgggaagatacgaagaaagtttcgcagccgctggctttggctccttcgagctggtcagccagatctctgctgaggacctgctccgaatcggagtcactctggcgggacaccagaagaaaatcttggccagtgtccagcacatgaagtcccaggccaagccgggaaccccgggtgggacaggaggaccggccccgcagtactga

SEQ ID NO: 376 - DNA, 2964 bp, Homo sapiens
atggagctccgggtgctgctctgctgggcttcgttggccgcagctttggaagagaccctgctgaacacaaaattggaaactgctgatctgaagtgggtgacattccctcaggtggacgggcagtgggaggaactgagcggcctggatgaggaacagcacagcgtgcgcacctacgaagtgtgtgacgtgcagcgtgccccgggccaggcccactggcttcgcacaggttgggtcccacggcggggcgccgtccacgtgtacgccacgctgcgcttcaccatgctcgagtgcctgtccctgcctcgggctgggcgctcctgcaaggagaccttcaccgtcttctactatgagagcgatgcggacacggccacggccctcacgccagcctggatggagaacccctacatcaaggtggacacggtggccgcggagcatctcacccggaagcgccctggggccgaggccaccgggaaggtgaatgtcaagacgctgcgtctgggaccgctcagcaaggctggcttctacctggccttccaggaccagggtgcctgcatggccctgctatccctgcacctcttctacaaaaagtgcgcccagctgactgtgaacctgactcgattcccggagactgtgcctcgggagctggttgtgcccgtggccggtagctgcgtggtggatgccgtccccgcccctggccccagccccagcctctactgccgtgaggatggccagtgggccgaacagccggtcacgggctgcagctgtgctccggggttcgaggcagctgaggggaacaccaagtgccgagcctgtgcccagggcaccttcaagcccctgtcaggagaagggtcctgccagccatgcccagccaatagccactctaacaccattggatcagccgtctgccagtgccgcgtcgggtacttccgggcacgcacagacccccggggtgcaccctgcaccacccctccttcggctccgcggagcgtggtttcccgcctgaacggctcctccctgcacctggaatggagtgcccccctggagtctggtggccgagaggacctcacctacgccctccgctgccgggagtgccgacccggaggctcctgtgcgccctgcgggggagacctgacttttgaccccggcccccgggacctggtggagccctgggtggtggttcgagggctacgtcctgacttcacctatacctttgaggtcactgcattgaacggggtatcctccttagccacggggcccgtcccatttgagcctgtcaatgtcaccactgaccgagaggtacctcctgcagtgtctgacatccgggtgacgcggtcctcacccagcagcttgagcctggcctgggctgttccccgggcacccagtggggctgtgctggactacgaggtcaaataccatgagaagggcgccgagggtcccagcagcgtgcggttcctgaagacgtcagaaaaccgggcagagctgcgggggctgaagcggggagccagctacctggtgcaggtacgggcgcgctctgaggccggctacgggcccttcggccaggaacatcacagccagacccaactggatgagagcgagggctggcgggagcagctggccctgattgcgggcacggcagtcgtgggtgtggtcctggtcctggtggtcattgtggtcgcagttctctgcctcaggaagcagagcaatgggagagaagcagaatattcgggcaaacacggacagtatctcatcggacatggtactaaggtctacatcgaccccttcacttatgaagaccctaatgaggctgtgagggaatttgcaaaagagatcgatgtctcctacgtcaagattgaagaggtgattggtgcaggtgagtttggcgaggtgtgccgggggcggctcaaggccccagggaagaaggagagctgtgtggcaatcaagaccctgaagggtggctacacggagcggcagcggcgtgagtttctgagcgaggcctccatcatgggccagttcgagcaccccaatatcatccgcctggagggcgtggtcaccaacagcatgcccgtcatgattctcacagagttcatggagaacggcgccctggactccttcctgcggctaaacgacggacagttcacagtcatccagctcgtgggcatgctgcggggcatcgcctcgggcatgcggtaccttgccgagatgagctacgtccaccgagacctggctgctcgcaacatcctagtcaacagcaacctcgtctgcaaagtgtctgactttggcctttcccgattcctggaggagaactcttccgatcccacctacacgagctccctgggaggaaagattcccatccgatggactgccccggaggccattgccttccggaagttcacttccgccagtgatgcctggagttacgggattgtgatgtgggaggtgatgtcatttggggagaggccgtactgggacatgagcaatcaggacgtgatcaatgccattgaacaggactaccggctgcccccgcccccagactgtcccacctccctccaccagctcatgctggactgttggcagaaagaccggaatgcccggccccgcttcccccaggtggtcagcgccctggacaagatgatccggaaccccgccagcctcaaaatcgtggcccgggagaatggcggggcctcacaccctctcctggaccagcggcagcctcactactcagcttttggctctgtgggcgagtggcttcgggccatcaaaatgggaagatacgaagaaagtttcgcagccgctggctttggctccttcgagctggtcagccagatctctgctgaggacctgctccgaatcggagtcactctggcgggacaccagaagaaaatcttggccagtgtccagcacatgaagtcccaggccaagccgggaaccccgggtgggacaggaggaccggccccgcagtactga

SEQ ID NO: 377 - DNA, 2964 bp, Homo sapiens
atggagctccgggtgctgctctgctgggcttcgttggccgcagctttggaagagaccctgctgaacacaaaattggaaactgctgatctgaagtgggtgacattccctcaggtggacgggcagtgggaggaactgagcggcctggatgaggaacagcacagcgtgcgcacctacgaagtgtgtgacgtgcagcgtgccccgggccaggcccactggcttcgcacaggttgggtcccacggcggggcgccgtccacgtgtacgccacgctgcgcttcaccatgctcgagtgcctgtccctgcctcgggctgggcgctcctgcaaggagaccttcaccgtcttctactatgagagcgatgcggacacggccacggccctcacgccagcctggatggagaacccctacatcaaggtggacacggtggccgcggagcatctcacccggaagcgccctggggccgaggccaccgggaaggtgaatgtcaagacgctgcgtctgggaccgctcagcaaggctggcttctacctggccttccaggaccagggtgcctgcatggccctgctatccctgcacctcttctacaaaaagtgcgcccagctgactgtgaacctgactcgattcccggagactgtgcctcgggagctggttgtgcccgtggccggtagctgcgtggtggatgccgtccccgcccctggccccagccccagcctctactgccgtgaggatggccagtgggccgaacagccggtcacgggctgcagctgtgctccggggttcgaggcagctgaggggaacaccaagtgccgagcctgtgcccagggcaccttcaagcccctgtcaggagaagggtcctgccagccatgcccagccaatagccactctaacaccattggatcagccgtctgccagtgccgcgtcgggtacttccgggcacgcacagacccccggggtgcaccctgcaccacccctccttcggctccgcggagcgtggtttcccgcctgaacggctcctccctgcacctggaatggagtgcccccctggagtctggtggccgagaggacctcacctacgccctccgctgccgggagtgccgacccggaggctcctgtgcgccctgcgggggagacctgacttttgaccccggcccccgggacctggtggagccctgggtggtggttcgagggctacgtcctgacttcacctatacctttgaggtcactgcattgaacggggtatcctccttagccacggggcccgtcccatttgagcctgtcaatgtcaccactgaccgagaggtacctcctgcagtgtctgacatccgggtgacgcggtcctcacccagcagcttgagcctggcctgggctgttccccgggcacccagtggggctgtgctggactacgaggtcaaataccatgagaagggcgccgagggtcccagcagcgtgcggttcctgaagacgtcagaaaaccgggcagagctgcgggggctgaagcggggagccagctacctggtgcaggtacgggcgcgctctgaggccggctacgggcccttcggccaggaacatcacagccagacccaactggatgagagcgagggctggcgggagcagctggccctgattgcgggcacggcagtcgtgggtgtggtcctggtcctggtggtcattgtggtcgcagttctctgcctcaggaagcagagcaatgggagagaagcagaatattcggacaaacacggacagtatctcatcggacatggtactaaggtctacatcgaccccttcacttatgaagaccctaatgaggctgtgagggaatttgcaaaagagaccgatgtctcctacgtcaagattgaagaggtgattggtgcaggtgagtttggcgaggtgtgccgggggcggctcaaggccccagggaagaaggagagctgtgtggcaatcaagaccctgaagggtggctacacggagcggcagcggcgtgagtttctgagcgaggcctccatcatgggccagttcgagcaccccaatatcatccgcctggagggcgtggtcaccaacagcatgcccgtcatgattctcacagagttcatggagaacggcgccctggactccttcctgcggctaaacgacggacagttcacagtcatccagctcgtgggcatgctgcggggcatcgcctcgggcatgcggtaccttgccgagatgagctacgtccaccgagacctggctgctcgcaacatcctagtcaacagcaacctcgtctgcaaagtgtctgactttggcctttcccgattcctggaggagaactcttccgatcccacctacacgagctccctgggaggaaagattcccatccgatggactgccccggaggccattgccttccggaagttcacttccgccagtgatgcctggagttacgggattgtgatgtgggaggtgatgtcatttggggagaggccgtactgggacatgagcaatcaggacgtgatcaatgccattgaacaggactaccggctgcccccgcccccagactgtcccacctccctccaccagctcatgctggactgttggcagaaagaccggaatgcccggccccgcttcccccaggtggtcagcgccctggacaagatgatccggaaccccgccagcctcaaaatcgtggcccgggagaatggcggggcctcacaccctctcctggaccagcggcagcctcactactcagcttttggctctgtgggcgagtggcttcgggccatcaaaatgggaagatacgaagaaagtttcgcagccgctggctttggctccttcgagctggtcagccagatctctgctgaggacctgctccgaatcggagtcactctggcgggacaccagaagaaaatcttggccagtgtccagcacatgaagtcccaggccaagccgggaaccccgggtgggacaggaggaccggccccgcagtactga

SEQ ID NO: 378 - DNA, 2964 bp, Homo sapiens
atggagctccgggtgctgctctgctgggcttcgttggccgcagctttggaagagaccctgctgaacacaaaattggaaactgctgatctgaagtgggtgacattccctcaggtggacgggcagtgggaggaactgagcggcctggatgaggaacagcacagcgtgcgcacctacgaagtgtgtgacgtgcagcgtgccccgggccaggcccactggcttcgcacaggttgggtcccacggcggggcgccgtccacgtgtacgccacgctgcgcttcaccatgctcgagtgcctgtccctgcctcgggctgggcgctcctgcaaggagaccttcaccgtcttctactatgagagcgatgcggacacggccacggccctcacgccagcctggatggagaacccctacatcaaggtggacacggtggccgcggagcatctcacccggaagcgccctggggccgaggccaccgggaaggtgaatgtcaagacgctgcgtctgggaccgctcagcaaggctggcttctacctggccttccaggaccagggtgcctgcatggccctgctatccctgcacctcttctacaaaaagtgcgcccagctgactgtgaacctgactcgattcccggagactgtgcctcgggagctggttgtgcccgtggccggtagctgcgtggtggatgccgtccccgcccctggccccagccccagcctctactgccgtgaggatggccagtgggccgaacagccggtcacgggctgcagctgtgctccggggttcgaggcagctgaggggaacaccaagtgccgagcctgtgcccagggcaccttcaagcccctgtcaggagaagggtcctgccagccatgcccagccaatagccactctaacaccattggatcagccgtctgccagtgccgcgtcgggtacttccgggcacgcacagacccccggggtgcaccctgcaccacccctccttcggctccgcggagcgtggtttcccgcctgaacggctcctccctgcacctggaatggagtgcccccctggagtctggtggccgagaggacctcacctacgccctccgctgccgggagtgccgacccggaggctcctgtgcgccctgcgggggagacctgacttttgaccccggcccccgggacctggtggagccctgggtggtggttcgagggctacgtcctgacttcacctatacctttgaggtcactgcattgaacggggtatcctccttagccacggggcccgtcccatttgagcctgtcaatgtcaccactgaccgagaggtacctcctgcagtgtctgacatccgggtgacgcggtcctcacccagcagcttgagcctggcctgggctgttccccgggcacccagtggggctgtgctggactacgaggtcaaataccatgagaagggcgccgagggtcccagcagcgtgcggttcctgaagacgtcagaaaaccgggcagagctgcgggggctgaagcggggagccagctacctggtgcaggtacgggcgcgctctgaggccggctacgggcccttcggccaggaacatcacagccagacccaactggatgagagcgagggctggcgggagcagctggccctgattgcgggcacggcagtcgtgggtgtggtcctggtcctggtggtcattgtggtcgcagttctctgcctcaggaagcagagcaatgggagagaagcagaatattcggacaaacacggacagtatctcatcggacatggtactaaggtctacatcgaccccttcacttatgaagaccctaatgaggctgtgagggaatttgcaaaagagatcgatgtctcctacgtcaagattgaagaggtgattggtgcaggtgagtttggcgaggtgtgccgggggcggctcaaggccccagggaagaaggagagctgtgtggcaatcaagaccctgaagggtggctacacggagcggcagcggcgtgagtttctgagcgaggcctccatcatgggccagttcgagcaccccaatatcatccgcctggagggcgtggtcaccaacagcatgcccgtcatgattctcacagagttcatggagaacggcgccctggactccttcctgcggctaaacgacggacagttcacagtcatccagctcgtgggcatgctgcggggcatcgcctcgggcatgcggtaccttgccgagatgagctacgtccaccgagacctggctgctcgcaacatcctagtcaacagcaacctcgtctgcaaagtgtctgactttggcctttcccgattcctggaggagaactcttccgatcccacctacacgagctccctgggaggaaagattcccatccgatggactgccccggaggccattgccttccggaagttcacttccgccagtgatgcctggagttacgggattgtgatgtgggaggtgatgtcatttggggagaggccgtactgggacatgagcaatcaggacgtgatcaatgccattgaacaggactaccggctgcccccgcccccagactgtcccacctccctccaccagctcatgctggactgttggcagaaagaccggaatgcccggccccgcttcccccaggtggtcagcgccctggacaagatgatccggaaccccgccagcctcaaaatcgtggcccgggataatggcggggcctcacaccctctcctggaccagcggcagcctcactactcagcttttggctctgtgggcgagtggcttcgggccatcaaaatgggaagatacgaagaaagtttcgcagccgctggctttggctccttcgagctggtcagccagatctctgctgaggacctgctccgaatcggagtcactctggcgggacaccagaagaaaatcttggccagtgtccagcacatgaagtcccaggccaagccgggaaccccgggtgggacaggaggaccggccccgcagtactga

SEQ ID NO: 379 - DNA, 2964 bp, Homo sapiens
atggagctccgggtgctgctctgctgggcttcgttggccgcagctttggaagagaccctgctgaacacaaaattggaaactgctgatctgaagtgggtgacattccctcaggtggacgggcagtgggaggaactgagcggcctggatgaggaacagcacagcgtgcgcacctacgaagtgtgtgacgtgcagcgtgccccgggccaggcccactggcttcgcacaggttgggtcccacggcggggcgccgtccacgtgtacgccacgctgcgcttcaccatgctcgagtgcctgtccctgcctcgggctgggcgctcctgcaaggagaccttcaccgtcttctactatgagagcgatgcggacacggccacggccctcacgccagcctggatggagaacccctacatcaaggtggacacggtggccgcggagcatctcacccggaagcgccctggggccgaggccaccgggaaggtgaatgtcaagacgctgcgtctgggaccgctcagcaaggctggcttctacctggccttccaggaccagggtgcctgcatggccctgctatccctgcacctcttctacaaaaagtgcgcccagctgactgtgaacctgactcgattcccggagactgtgcctcgggagctggttgtgcccgtggccggtagctgcgtggtggatgccgtccccgcccctggccccagccccagcctctactgccgtgaggatggccagtgggccgaacagccggtcacgggctgcagctgtgctccggggttcgaggcagctgaggggaacaccaagtgccgagcctgtgcccagggcaccttcaagcccctgtcaggagaagggtcctgccagccatgcccagccaatagccactctaacaccattggatcagccgtctgccagtgccgcgtcgggtacttccgggcacgcacagacccccggggtgcaccctgcaccacccctccttcggctccgcggagcgtggtttcccgcctgaacggctcctccctgcacctggaatggagtgcccccctggagtctggtggccgagaggacctcacctacgccctccgctgccgggagtgccgacccggaggctcctgtgcgccctgcgggggagacctgacttttgaccccggcccccgggacctggtggagccctgggtggtggttcgagggctacgtcctgacttcacctatacctttgaggtcactgcattgaacggggtatcctccttagccacggggcccgtcccatttgagcctgtcaatgtcaccactgaccgagaggtacctcctgcagtgtctgacatccgggtgacgcggtcctcacccagcagcttgagcctggcctgggctgttccccgggcacccagtggggctgtgctggactacgaggtcaaataccatgagaagggcgccgagggtcccagcagcgtgcggttcctgaagacgtcagaaaaccgggcagagctgcgggggctgaagcggggagccagctacctggtgcaggtacgggcgcgctctgaggccggctacgggcccttcggccaggaacatcacagccagacccaactggatgagagcgagggctggcgggagcagctggccctgattgcgggcacggcagtcgtgggtgtggtcctggtcctggtggtcattgtggtcgcagttctctgcctcaggaagcagagcaatgggagagaagcagaatattcggacaaacacggacagtatctcatcggacatggtactaaggtctacatcgaccccttcacttatgaagaccctaatgaggctgtgagggaatttgcaaaagagatcgatgtctcctacgtcaagattgaagaggtgattggtgcaggtgagtttggcgaggtgtgccgggggcggctcaaggccccagggaagaaggagagctgtgtggcaatcaagaccctgaagggtggctacacggagcggcagcggcgtgagtttctgagcgaggcctccatcatgggccagttcgagcaccccaatatcatccgcctggagggcgtggtcaccaacagcatgcccgtcatgattctcacagagttcatggagaacggcgccctggactccttcctgcggctaaacgacggacagttcacagtcatccagctcgtgggcatgctgcggggcatcgcctcgggcatgcggtaccttgccgagatgagctacgtccaccgagacctggctgctcgcaacatcctagtcaacagcaacctcgtctgcaaagtgtctgactttggcctttcccgattcctggaggagaactcttccgatcccacctacacgagctccctgggaggaaagattcccatccgatggactgccccggaggccattgccttccggaagttcacttccgccagtgatgcctggagttacgggattgtgatgtgggaggtgatgtcatttggggagaggccgtactgggacatgagcaatcaggacgtgatcaatgccattgaacaggactaccggctgcccccgcccccagactgtcccacctccctccaccagctcatgctggactgttggcagaaagaccggaatgcccggccccgcttcccccaggtggtcagcgccctggacaagatgatccggaaccccgccagcctcaaaatcgtggcccgggagaatggcggggcctcacaccctctcctggaccagcggcagcctcactactcagcttttggctctgtgggcgagtggcttcgggccatcaaaatgggaagatacgaagaaagtttcgcagccgctggctttggctccttcgagctggtcagccagatctctgctgaggacctgctccgaatcggagtcactctggtgggacaccagaagaaaatcttggccagtgtccagcacatgaagtcccaggccaagccgggaaccccgggtgggacaggaggaccggccccgcagtactga

SEQ ID NO: 380 - DNA, 2664 bp, Homo sapiens
atggtgtgtagcctatgggtgctgctcctggtgtcttcagttctggctctggaagaggtattgctggacaccaccggagagacatctgagattggctggctcacctacccaccaggggggtgggacgaggtgagtgttctggacgaccagcgacgcctgactcggacctttgaggcatgtcatgtggcaggggcccctccaggcaccgggcaggacaattggttgcagacacactttgtggagcggcgcggggcccagagggcgcacattcgactccacttctctgtgcgggcatgctccagcctgggtgtgagcggcggcacctgccgggagaccttcaccctttactaccgtcaggctgaggagcccgacagccctgacagcgtttcctcctggcacctcaaacgctggaccaaggtggacacaattgcagcagacgagagctttccctcctcctcctcctcctcctcctcttcttcctctgcagcgtgggctgtgggaccccacggggctgggcagcgggctggactgcaactgaacgtcaaagagcggagctttgggcctctcacccaacgcggcttctacgtggccttccaggacacgggggcctgcctggccctggtcgctgtcaggctcttctcctacacctgccctgccgtgctccgatcctttgcttcctttccagagacgcaggccagtggggctgggggggcctccctggtggcagctgtgggcacctgtgtggctcatgcagagccagaggaggatggagtagggggccaggcaggaggcagcccccccaggctgcactgcaacggggagggcaagtggatggtagctgtcgggggctgccgctgccagcctggataccaaccagcacgaggagacaaggcctgccaagcctgcccacgggggctctataagtcttctgctgggaatgctccctgctcaccatgccctgcccgcagtcacgctcccaacccagcagcccccgtttgcccctgcctggagggcttctaccgggccagttccgacccaccagaggccccctgcactgtgccctctgctgtccctgtggtgcaccaggtgagccgggcatccaacagcatcacggtgtcctggccgcagcccgaccagaccaatgggaacatcctggactatcagctccgctactatgaccaggcagaagacgaatcccactccttcaccctgaccagcgagaccaacactgccaccgtgacacagctgagccctggccacatctatggtttccaggtgcgggcccggactgctgccggccacggcccctacgggggcaaagtctatttccagacacttcctcaaggggagctgtcttcccagcttccggaaagactctccttggtgatcggctccatcctgggggctttggccttcctcctgctggcagccatcaccgtgctggcggtcgtcttccagcggaagcggcgtgggactggctacacggagcagctgcagcaatacagcagcccaggactcggggtgaagtattacatcgacccctccacctacgaggacccctgtcaggccatccgagaacttgcccgggaagtcgatcctgcttatatcaagattgaggaggtcattgggacaggctcttttggagaagtgcgccagggccgcctgcagccacggggacggagggagcagactgtggccatccaggccctgtgggccgggggcgccgaaagcctgcagatgaccttcctgggccgggccgcagtgctgggtcagttccagcaccccaacatcctgcggctggagggcgtggtcaccaagagccgacccctcatggtgctgacggagttcatggagcttggccccctggacagcttcctcaggcagcgggagggccagttcagcagcctgcagctggtggccatgcagcggggagtggctgctgccatgcagtacctgtccagctttgccttcgtccatcgctcgctgtctgcccacagcgtgctggtgaatagccacttggtgtgcaaggtggcccgtcttggccacagtcctcagggcccaagttgtttgcttcgctgggcagccccagaggtcattgcacatggaaagcatacaacatccagtgatgtctggagctttgggatactcatgtgggaagtgatgagttatggagaacggccttactgggacatgagtgagcaggaggtactaaatgcaatagagcaggagttccggctgcccccgcctccaggctgtcctcctggattacatctacttatgttggacacttggcagaaggaccgtgcccggcggcctcattttgaccagctggtggctgcatttgacaagatgatccgcaagccagataccctgcaggctggcggggacccaggggaaaggccttcccaggcccttctgacccctgtggccctggactttccttgtctggactcaccccaggcctggctttcagccattggactggagtgctaccaggacaacttctccaagtttggcctctgtaccttcagtgatgtggctcagctcagcctagaagacctgcctgccctgggcatcaccctggctggccaccagaagaagctgctgcaccacatccagctccttcagcaacacctgaggcagcagggctcagtggaggtctga

SEQ ID NO: 381 - DNA, 3021 bp, Homo sapiens
atggtgtgtagcctatgggtgctgctcctggtgtcttcagttctggctctggaagaggtattgctggacaccaccggagagacatctgagattggctggctcacctacccaccaggggggtgggacgaggtgagtgttctggacgaccagcgacgcctgactcggacctttgaggcatgtcatgtggcaggggcccctccaggcaccgggcaggacaattggttgcagacacactttgtggagcggcgcggggcccagagggcgcacattcgactccacttctctgtgcgggcatgctccagcctgggtgtgagcggcggcacctgccgggagaccttcaccctttactaccgtcaggctgaggagcccgacagccctgacagcgtttcctcctggcacctcaaacgctggaccaaggtggacacaattgcagcagacgagagctttccctcctcctcctcctcctcctcctcttcttcctctgcagcgtgggctgtgggaccccacggggctgggcagcgggctggactgcaactgaacgtcaaagagcggagctttgggcctctcacccaacgcggcttctacgtggccttccaggacacgggggcctgcctggccctggtcgctgtcaggctcttctcctacacctgccctgccgtgctccgatcctttgcttcctttccagagacgcaggccagtggggctgggggggcctccctggtggcagctgtgggcacctgtgtggctcatgcagagccagaggaggatggagtagggggccaggcaggaggcagcccccccaggctgcactgcaacggggagggcaagtggatggtagctgtcgggggctgccgctgccagcctggataccaaccagcacgaggagacaaggcctgccaagcctgcccacgggggctctataagtcttctgctgggaatgctccctgctcaccatgccctgcccgcagtcacgctcccaacccagcagcccccgtttgcccctgcctggagggcttctaccgggccagttccgacccaccagaggccccctgcactggtcctccatcggctccccaggagctttggtttgaggtgcaaggctcaacactcatgctacactggcgcctgcctcgggagctggggggtcgaggggacctgctcttcaatgtcgtgtgcaaggagtgtgaaggccgccaggaacctgccagcggtggtgggggcacttgtcaccgctgcagggatgaggtccacttcgaccctcgccagagaggcctgactgagagccgagtgttagtggggggactccgggcacacgtaccctacatcttagaggtgcaggctgttaatggggtgtctgagctcagccctgaccctcctcaggctgcagccatcaatgtcagcaccagccatgaagtgccctctgctgtccctgtggtgcaccaggtgagccgggcatccaacagcatcacggtgtcctggccgcagcccgaccagaccaatgggaacatcctggactatcagctccgctactatgaccaggcagaagacgaatcccactccttcaccctgaccagcgagaccaacactgccaccgtgacacagctgagccctggccacatctatggtttccaggtgcgggcccggactgctgccggccacggcccctacgggggcaaagtctatttccagacacttcctcaaggggagctgtcttcccagcttccggaaagactctccttggtgatcggctccatcctgggggctttggccttcctcctgctggcagccatcaccgtgctggcggtcgtcttccagcggaagcggcgtgggactggctacacggagcagctgcagcaatacagcagcccaggactcggggtgaagtattacatcgacccctccacctacgaggacccctgtcaggccatccgagaacttgcccgggaagtcgatcctgcttatatcaagattgaggaggtcattgggacaggctcttttggagaagtgcgccagggccgcctgcagccacggggacggagggagcagactgtggccatccaggccctgtgggccgggggcgccgaaagcctgcagatgaccttcctgggccgggccgcagtgctgggtcagttccagcaccccaacatcctgcggctggagggcgtggtcaccaagagccgacccctcatggtgctgacggagttcatggagcttggccccctggacagcttcctcaggcagcgggagggccagttcagcagcctgcagctggtggccatgcagcggggagtggctgctgccatgcagtacctgtccagctttgccttcgtccatcgctcgctgtctgcccacagcgtgctggtgaatagccacttggtgtgcaaggtggcccgtcttggccacagtcctcagggcccaagttgtttgcttcgctgggcagccccagaggtcattgcacatggaaagcatacaacatccagtgatgtctggagctttgggatactcatgtgggaagtgatgagttatggagaacggccttactgggacatgagtgagcaggaggtactaaatgcaatagagcaggagttccggctgcccccgcctccaggctgtcctcctggattacatctacttatgttggacacttggcagaaggaccgtgcccggcggcctcattttgaccagctggtggctgcatttgacaagatgatccgcaagccagataccctgcaggctggcggggacccaggggaaaggccttcccaggcccttctgacccctgtggccctggactttccttgtctggactcaccccaggcctggctttcagccattggactggagtgctaccaggacaacttctccaagtttggcctctgtaccttcagtgatgtggctcagctcagcctagaagacctgcctgccctgggcatcaccctggctggccaccagaagaagctgctgcaccacatccagctccttcagcaacacctgaggcagcagggctcagtggaggtctga

SEQ ID NO: 382 - DNA, 3021 bp, Homo sapiens
atggtgtgtagcctatgggtgctgctcctggtgtcttcagttctggctctggaagaggtattgctggacaccaccggagagacatctgagattggctggctcacctacccaccaggggggtgggacgaggtgagtgttctggacgaccagcgacgcctgactcggacctttgaggcatgtcatgtggcaggggcccctccaggcaccgggcaggacaattggttgcagacacactttgtggagcggcgcggggcccagagggcgcacattcgactccacttctctgtgcgggcatgctccagcctgggtgtgagcggcggcacctgccgggagaccttcaccctttactaccgtcaggctgaggagcccgacagccctgacagcgtttcctcctggcacctcaaacgctggaccaaggtggacacaattgcagcagacgagagctttccctcctcctcctcctcctcctcctcttcttcctctgcagcgtgggctgtgggaccccacggggctgggcagcgggctggactgcaactgaacgtcaaagagcggagctttgggcctctcacccaacgcggcttctacgtggccttccaggacacgggggcctgcctggccctggtcgctgtcaggctcttctcctacacctgccctgccgtgctccgatcctttgcttcctttccagagacgcaggccagtggggctgggggggcctccctggtggcagctgtgggcacctgtgtggctcatgcagagccagaggaggatggagtagggggccaggcaggaggcagcccccccaggctgcactgcaacggggagggcaagtggatggtagctgtcgggggctgccgctgccagcctggataccaaccagcacgaggagacaaggcctgccaagcctgcccacgggggctctataagtcttctgctgggaatgctccctgctcaccatgccctgcccgcagtcacgctcccaacccagcagcccccgtttgcccctgcctggagggcttctaccgggccagttccgacccaccagaggccccctgcactggtcctccatcggctccccaggagctttggtttgaggtgcaaggctcagcactcatgctacactggcgcctgcctcgggagctggggggtcgaggggacctgctcttcaatgtcgtgtgcaaggagtgtgaaggccgccaggaacctgccagcggtggtgggggcacttgtcaccgctgcagggatgaggtccacttcgaccctcgccagagaggcctgactgagagccgagtgttagtggggggactccgggcacacgtaccctacatcttagaggtgcaggctgttaatggggtgtctgagctcagccctgaccctcctcaggctgcagccatcaatgtcagcaccagccatgaagtgccctctgctgtccctgtggtgcaccaggtgagccgggcatccaacagcatcacggtgtcctggccgcagcccgaccagaccaatgggaacatcctggactatcagctccgctactatgaccaggcagaagacgaatcccactccttcaccctgaccagcgagaccaacactgccaccgtgacacagctgagccctggccacatctatggtttccaggtgcgggcccggactgctgccggccacggcccctacgggggcaaagtctatttccagacacttcctcaaggggagctgtcttcccagcttccggaaagactctcctttgtgatcggctccatcctgggggctttggccttcctcctgctggcagccatcaccgtgctggcggtcgtcttccagcggaagcggcgtgggactggctacacggagcagctgcagcaatacagcagcccaggactcggggtgaagtattacatcgacccctccacctacgaggacccctgtcaggccatccgagaacttgcccgggaagtcgatcctgcttatatcaagattgaggaggtcattgggacaggctcttttggagaagtgcgccagggccgcctgcagccacggggacggagggagcagactgtggccatccaggccctgtgggccgggggcgccgaaagcctgcagatgaccttcctgggccgggccgcagtgctgggtcagttccagcaccccaacatcctgcggctggagggcgtggtcaccaagagccgacccctcatggtgctgacggagttcatggagcttggccccctggacagcttcctcaggcagcgggagggccagttcagcagcctgcagctggtggccatgcagcggggagtggctgctgccatgcagtacctgtccagctttgccttcgtccatcgctcgctgtctgcccacagcgtgctggtgaatagccacttggtgtgcaaggtggcccgtcttggccacagtcctcagggcccaagttgtttgcttcgctgggcagccccagaggtcattgcacatggaaagcatacaacatccagtgatgtctggagctttgggatactcatgtgggaagtgatgagttatggagaacggccttactgggacatgagtgagcaggaggtactaaatgcaatagagcaggagttccggctgcccccgcctccaggctgtcctcctggattacatctacttatgttggacacttggcagaaggaccgtgcccggcggcctcattttgaccagctggtggctgcatttgacaagatgatccgcaagccagataccctgcaggctggcggggacccaggggaaaggccttcccaggcccttctgacccctgtggccctggactttccttgtctggactcaccccaggcctggctttcagccattggactggagtgctaccaggacaacttctccaagtttggcctctgtaccttcagtgatgtggctcagctcagcctagaagacctgcctgccctgggcatcaccctggctggccaccagaagaagctgctgcaccacatccagctccttcagcaacacctgaggcagcagggctcagtggaggtctga

SEQ ID NO: 383 - DNA, 3021 bp, Homo sapiens
atggtgtgtagcctatgggtgctgctcctggtgtcttcagttctggctctggaagaggtattgctggacaccaccggagagacatctgagattggctggctcacctacccaccaggggggtgggacgaggtgagtgttctggacgaccagcgacgcctgactcggacctttgaggcatgtcatgtggcaggggcccctccaggcaccgggcaggacaattggttgcagacacactttgtggagcggcgcggggcccagagggcgcacattcgactccacttctctgtgcgggcatgctccagcctgggtgtgagcggcggcacctgccgggagaccttcaccctttactaccgtcaggctgaggagcccgacagccctgacagcgtttcctcctggcacctcaaacgctggaccaaggtggacacaattgcagcagacgagagctttccctcctcctcctcctcctcctcctcttcttcctctgcagcgtgggctgtgggaccccacggggctgggcagcgggctggactgcaactgaacgtcaaagagcggagctttgggcctctcacccaacgcggcttctacgtggccttccaggacacgggggcctgcctggccctggtcgctgtcaggctcttctcctacacctgccctgccgtgctccgatcctttgcttcctttccagagacgcaggccagtggggctgggggggcctccctggtggcagctgtgggcacctgtgtggctcatgcagagccagaggaggatggagtagggggccaggcaggaggcagcccccccaggctgcactgcaacggggagggcaagtggatggtagctgtcgggggctgccgctgccagcctggataccaaccagcacgaggagacaaggcctgccaagcctgcccacgggggctctataagtcttctgctgggaatgctccctgctcaccatgccctgcccgcagtcacgctcccaacccagcagcccccgtttgcccctgcctggagggcttctaccgggccagttccgacccaccagaggccccctgcactggtcctccatcggctccccaggagctttggtttgaggtgcaaggctcagcactcatgctacactggcgcctgcctcgggagctggggggtcgaggggacctgctcttcaatgtcgtgtgcaaggagtgtgaaggccgccaggaacctgccagcggtggtgggggcacttgtcaccgctgcagggatgaggtccacttcgaccctcgccagagaggcctgactgagagccgagtgttagtggggggactccgggcacacgtaccctacatcttagaggtgcaggctgttaatggggtgtctgagctcagccctgaccctcctcaggctgcagccatcaatgtcagcaccagccatgaagtgccctctgctgtccctgtggtgcaccaggtgagccgggcatccaacagcatcacggtgtcctggccgcagcccgaccagaccaatgggaacatcctggactatcagctccgctactatgaccaggcagaagacgaatcccactccttcaccctgaccagcgagaccaacactgccaccgtgacacagctgagccctggccacatctatggtttccaggtgcgggcccggactgctgccggccacggcccctacgggggcaaagtctatttccagacacttcctcaaggggagctgtcttcccagcttccggaaagactctccttggtgatcggctccatcctgggggctttggccttcctcctgctggcagccatcaccgtgctggcggtcgtcttccagcggaagcggcgtgggactggctacacgaagcagctgcagcaatacagcagcccaggactcggggtgaagtattacatcgacccctccacctacgaggacccctgtcaggccatccgagaacttgcccgggaagtcgatcctgcttatatcaagattgaggaggtcattgggacaggctcttttggagaagtgcgccagggccgcctgcagccacggggacggagggagcagactgtggccatccaggccctgtgggccgggggcgccgaaagcctgcagatgaccttcctgggccgggccgcagtgctgggtcagttccagcaccccaacatcctgcggctggagggcgtggtcaccaagagccgacccctcatggtgctgacggagttcatggagcttggccccctggacagcttcctcaggcagcgggagggccagttcagcagcctgcagctggtggccatgcagcggggagtggctgctgccatgcagtacctgtccagctttgccttcgtccatcgctcgctgtctgcccacagcgtgctggtgaatagccacttggtgtgcaaggtggcccgtcttggccacagtcctcagggcccaagttgtttgcttcgctgggcagccccagaggtcattgcacatggaaagcatacaacatccagtgatgtctggagctttgggatactcatgtgggaagtgatgagttatggagaacggccttactgggacatgagtgagcaggaggtactaaatgcaatagagcaggagttccggctgcccccgcctccaggctgtcctcctggattacatctacttatgttggacacttggcagaaggaccgtgcccggcggcctcattttgaccagctggtggctgcatttgacaagatgatccgcaagccagataccctgcaggctggcggggacccaggggaaaggccttcccaggcccttctgacccctgtggccctggactttccttgtctggactcaccccaggcctggctttcagccattggactggagtgctaccaggacaacttctccaagtttggcctctgtaccttcagtgatgtggctcagctcagcctagaagacctgcctgccctgggcatcaccctggctggccaccagaagaagctgctgcaccacatccagctccttcagcaacacctgaggcagcagggctcagtggaggtctga

SEQ ID NO: 384 - DNA, 3021 bp, Homo sapiens
atggtgtgtagcctatgggtgctgctcctggtgtcttcagttctggctctggaagaggtattgctggacaccaccggagagacatctgagattggctggctcacctacccaccaggggggtgggacgaggtgagtgttctggacgaccagcgacgcctgactcggacctttgaggcatgtcatgtggcaggggcccctccaggcaccgggcaggacaattggttgcagacacactttgtggagcggcgcggggcccagagggcgcacattcgactccacttctctgtgcgggcatgctccagcctgggtgtgagcggcggcacctgccgggagaccttcaccctttactaccgtcaggctgaggagcccgacagccctgacagcgtttcctcctggcacctcaaacgctggaccaaggtggacacaattgcagcagacgagagctttccctcctcctcctcctcctcctcctcttcttcctctgcagcgtgggctgtgggaccccacggggctgggcagcgggctggactgcaactgaacgtcaaagagcggagctttgggcctctcacccaacgcggcttctacgtggccttccaggacacgggggcctgcctggccctggtcgctgtcaggctcttctcctacacctgccctgccgtgctccgatcctttgcttcctttccagagacgcaggccagtggggctgggggggcctccctggtggcagctgtgggcacctgtgtggctcatgcagagccagaggaggatggagtagggggccaggcaggaggcagcccccccaggctgcactgcaacggggagggcaagtggatggtagctgtcgggggctgccgctgccagcctggataccaaccagcacgaggagacaaggcctgccaagcctgcccacgggggctctataagtcttctgctgggaatgctccctgctcaccatgccctgcccgcagtcacgctcccaacccagcagcccccgtttgcccctgcctggagggcttctaccgggccagttccgacccaccagaggccccctgcactggtcctccatcggctccccaggagctttggtttgaggtgcaaggctcagcactcatgctacactggcgcctgcctcgggagctggggggtcgaggggacctgctcttcaatgtcgtgtgcaaggagtgtgaaggccgccaggaacctgccagcggtggtgggggcacttgtcaccgctgcagggatgaggtccacttcgaccctcgccagagaggcctgactgagagccgagtgttagtggggggactccgggcacacgtaccctacatcttagaggtgcaggctgttaatggggtgtctgagctcagccctgaccctcctcaggctgcagccatcaatgtcagcaccagccatgaagtgccctctgctgtccctgtggtgcaccaggtgagccgggcatccaacagcatcacggtgtcctggccgcagcccgaccagaccaatgggaacatcctggactatcagctccgctactatgaccaggcagaagacgaatcccactccttcaccctgaccagcgagaccaacactgccaccgtgacacagctgagccctggccacatctatggtttccaggtgcgggcccggactgctgccggccacggcccctacgggggcaaagtctatttccagacacttcctcaaggggagctgtcttcccagcttccggaaagactctccttggtgatcggctccatcctgggggctttggccttcctcctgctggcagccatcaccgtgctggcggtcgtcttccagcggaagcggcgtgggactggctacacggagcagctgcagcaatacagcagcccaggactcggggtgaagtattacatcgacccctccacctacgaggacccctgtcaggccatccgagaacttgtccgggaagtcgatcctgcttatatcaagattgaggaggtcattgggacaggctcttttggagaagtgcgccagggccgcctgcagccacggggacggagggagcagactgtggccatccaggccctgtgggccgggggcgccgaaagcctgcagatgaccttcctgggccgggccgcagtgctgggtcagttccagcaccccaacatcctgcggctggagggcgtggtcaccaagagccgacccctcatggtgctgacggagttcatggagcttggccccctggacagcttcctcaggcagcgggagggccagttcagcagcctgcagctggtggccatgcagcggggagtggctgctgccatgcagtacctgtccagctttgccttcgtccatcgctcgctgtctgcccacagcgtgctggtgaatagccacttggtgtgcaaggtggcccgtcttggccacagtcctcagggcccaagttgtttgcttcgctgggcagccccagaggtcattgcacatggaaagcatacaacatccagtgatgtctggagctttgggatactcatgtgggaagtgatgagttatggagaacggccttactgggacatgagtgagcaggaggtactaaatgcaatagagcaggagttccggctgcccccgcctccaggctgtcctcctggattacatctacttatgttggacacttggcagaaggaccgtgcccggcggcctcattttgaccagctggtggctgcatttgacaagatgatccgcaagccagataccctgcaggctggcggggacccaggggaaaggccttcccaggcccttctgacccctgtggccctggactttccttgtctggactcaccccaggcctggctttcagccattggactggagtgctaccaggacaacttctccaagtttggcctctgtaccttcagtgatgtggctcagctcagcctagaagacctgcctgccctgggcatcaccctggctggccaccagaagaagctgctgcaccacatccagctccttcagcaacacctgaggcagcagggctcagtggaggtctga

SEQ ID NO: 385 - DNA, 3021 bp, Homo sapiens
atggtgtgtagcctatgggtgctgctcctggtgtcttcagttctggctctggaagaggtattgctggacaccaccggagagacatctgagattggctggctcacctacccaccaggggggtgggacgaggtgagtgttctggacgaccagcgacgcctgactcggacctttgaggcatgtcatgtggcaggggcccctccaggcaccgggcaggacaattggttgcagacacactttgtggagcggcgcggggcccagagggcgcacattcgactccacttctctgtgcgggcatgctccagcctgggtgtgagcggcggcacctgccgggagaccttcaccctttactaccgtcaggctgaggagcccgacagccctgacagcgtttcctcctggcacctcaaacgctggaccaaggtggacacaattgcagcagacgagagctttccctcctcctcctcctcctcctcctcttcttcctctgcagcgtgggctgtgggaccccacggggctgggcagcgggctggactgcaactgaacgtcaaagagcggagctttgggcctctcacccaacgcggcttctacgtggccttccaggacacgggggcctgcctggccctggtcgctgtcaggctcttctcctacacctgccctgccgtgctccgatcctttgcttcctttccagagacgcaggccagtggggctgggggggcctccctggtggcagctgtgggcacctgtgtggctcatgcagagccagaggaggatggagtagggggccaggcaggaggcagcccccccaggctgcactgcaacggggagggcaagtggatggtagctgtcgggggctgccgctgccagcctggataccaaccagcacgaggagacaaggcctgccaagcctgcccacgggggctctataagtcttctgctgggaatgctccctgctcaccatgccctgcccgcagtcacgctcccaacccagcagcccccgtttgcccctgcctggagggcttctaccgggccagttccgacccaccagaggccccctgcactggtcctccatcggctccccaggagctttggtttgaggtgcaaggctcagcactcatgctacactggcgcctgcctcgggagctggggggtcgaggggacctgctcttcaatgtcgtgtgcaaggagtgtgaaggccgccaggaacctgccagcggtggtgggggcacttgtcaccgctgcagggatgaggtccacttcgaccctcgccagagaggcctgactgagagccgagtgttagtggggggactccgggcacacgtaccctacatcttagaggtgcaggctgttaatggggtgtctgagctcagccctgaccctcctcaggctgcagccatcaatgtcagcaccagccatgaagtgccctctgctgtccctgtggtgcaccaggtgagccgggcatccaacagcatcacggtgtcctggccgcagcccgaccagaccaatgggaacatcctggactatcagctccgctactatgaccaggcagaagacgaatcccactccttcaccctgaccagcgagaccaacactgccaccgtgacacagctgagccctggccacatctatggtttccaggtgcgggcccggactgctgccggccacggcccctacgggggcaaagtctatttccagacacttcctcaaggggagctgtcttcccagcttccggaaagactctccttggtgatcggctccatcctgggggctttggccttcctcctgctggcagccatcaccgtgctggcggtcgtcttccagcggaagcggcgtgggactggctacacggagcagctgcagcaatacagcagcccaggactcggggtgaagtattacatcgacccctccacctacgaggacccctgtcaggccatccgagaacttgcccgggaagtcgatcctgcttatatcaagattgaggaggtcattgggacaggctcttttggagaagtgcgccagggccgcctgcagccacggggacggagggagcagactgtggccatccaggccctgtgggccgggggcgccgaaagcctgcagatgaccttcctgggccgggccgcagtgctgggtcagttccagcaccccaacatcctgcggctggagggcgtggtcaccaagagccgacccctcatggtgctgacggagttcatggagcttggccccctggacagcttcctcaggcagcgggagggccagttcagcagcctgcagctggtggccatgcagcggggagtggctgctgccatgcagtacctgtccagctttgccttcgtccatcgctcgctgtctgcccacagagtgctggtgaatagccacttggtgtgcaaggtggcccgtcttggccacagtcctcagggcccaagttgtttgcttcgctgggcagccccagaggtcattgcacatggaaagcatacaacatccagtgatgtctggagctttgggatactcatgtgggaagtgatgagttatggagaacggccttactgggacatgagtgagcaggaggtactaaatgcaatagagcaggagttccggctgcccccgcctccaggctgtcctcctggattacatctacttatgttggacacttggcagaaggaccgtgcccggcggcctcattttgaccagctggtggctgcatttgacaagatgatccgcaagccagataccctgcaggctggcggggacccaggggaaaggccttcccaggcccttctgacccctgtggccctggactttccttgtctggactcaccccaggcctggctttcagccattggactggagtgctaccaggacaacttctccaagtttggcctctgtaccttcagtgatgtggctcagctcagcctagaagacctgcctgccctgggcatcaccctggctggccaccagaagaagctgctgcaccacatccagctccttcagcaacacctgaggcagcagggctcagtggaggtctga

SEQ ID NO: 386 - DNA, 3021 bp, Homo sapiens
atggtgtgtagcctatgggtgctgctcctggtgtcttcagttctggctctggaagaggtattgctggacaccaccggagagacatctgagattggctggctcacctacccaccaggggggtgggacgaggtgagtgttctggacgaccagcgacgcctgactcggacctttgaggcatgtcatgtggcaggggcccctccaggcaccgggcaggacaattggttgcagacacactttgtggagcggcgcggggcccagagggcgcacattcgactccacttctctgtgcgggcatgctccagcctgggtgtgagcggcggcacctgccgggagaccttcaccctttactaccgtcaggctgaggagcccgacagccctgacagcgtttcctcctggcacctcaaacgctggaccaaggtggacacaattgcagcagacgagagctttccctcctcctcctcctcctcctcctcttcttcctctgcagcgtgggctgtgggaccccacggggctgggcagcgggctggactgcaactgaacgtcaaagagcggagctttgggcctctcacccaacgcggcttctacgtggccttccaggacacgggggcctgcctggccctggtcgctgtcaggctcttctcctacacctgccctgccgtgctccgatcctttgcttcctttccagagacgcaggccagtggggctgggggggcctccctggtggcagctgtgggcacctgtgtggctcatgcagagccagaggaggatggagtagggggccaggcaggaggcagcccccccaggctgcactgcaacggggagggcaagtggatggtagctgtcgggggctgccgctgccagcctggataccaaccagcacgaggagacaaggcctgccaagcctgcccacgggggctctataagtcttctgctgggaatgctccctgctcaccatgccctgcccgcagtcacgctcccaacccagcagcccccgtttgcccctgcctggagggcttctaccgggccagttccgacccaccagaggccccctgcactggtcctccatcggctccccaggagctttggtttgaggtgcaaggctcagcactcatgctacactggcgcctgcctcgggagctggggggtcgaggggacctgctcttcaatgtcgtgtgcaaggagtgtgaaggccgccaggaacctgccagcggtggtgggggcacttgtcaccgctgcagggatgaggtccacttcgaccctcgccagagaggcctgactgagagccgagtgttagtggggggactccgggcacacgtaccctacatcttagaggtgcaggctgttaatggggtgtctgagctcagccctgaccctcctcaggctgcagccatcaatgtcagcaccagccatgaagtgccctctgctgtccctgtggtgcaccaggtgagccgggcatccaacagcatcacggtgtcctggccgcagcccgaccagaccaatgggaacatcctggactatcagctccgctactatgaccaggcagaagacgaatcccactccttcaccctgaccagcgagaccaacactgccaccgtgacacagctgagccctggccacatctatggtttccaggtgcgggcccggactgctgccggccacggcccctacgggggcaaagtctatttccagacacttcctcaaggggagctgtcttcccagcttccggaaagactctccttggtgatcggctccatcctgggggctttggccttcctcctgctggcagccatcaccgtgctggcggtcgtcttccagcggaagcggcgtgggactggctacacggagcagctgcagcaatacagcagcccaggactcggggtgaagtattacatcgacccctccacctacgaggacccctgtcaggccatccgagaacttgcccgggaagtcgatcctgcttatatcaagattgaggaggtcattgggacaggctcttttggagaagtgcgccagggccgcctgcagccacggggacggagggagcagactgtggccatccaggccctgtgggccgggggcgccgaaagcctgcagatgaccttcctgggccgggccgcagtgctgggtcagttccagcaccccaacatcctgcggctggagggcgtggtcaccaagagccgacccctcatggtgctgacggagttcatggagcttggccccctggacagcttcctcaggcagcgggagggccagttcagcagcctgcagctggtggccatgcagcggggagtggctgctgccatgcagtacctgtccagctttgccttcgtccatcgctcgctgtctgcccacagcgtgctggtgaatagccacttggtgtgcaaggtggcccgtcttggccacagtcctcagggcccaagttgtttgctttgctgggcagccccagaggtcattgcacatggaaagcatacaacatccagtgatgtctggagctttgggatactcatgtgggaagtgatgagttatggagaacggccttactgggacatgagtgagcaggaggtactaaatgcaatagagcaggagttccggctgcccccgcctccaggctgtcctcctggattacatctacttatgttggacacttggcagaaggaccgtgcccggcggcctcattttgaccagctggtggctgcatttgacaagatgatccgcaagccagataccctgcaggctggcggggacccaggggaaaggccttcccaggcccttctgacccctgtggccctggactttccttgtctggactcaccccaggcctggctttcagccattggactggagtgctaccaggacaacttctccaagtttggcctctgtaccttcagtgatgtggctcagctcagcctagaagacctgcctgccctgggcatcaccctggctggccaccagaagaagctgctgcaccacatccagctccttcagcaacacctgaggcagcagggctcagtggaggtctga

SEQ ID NO: 387 - DNA, 3225 bp, Homo sapiens
atgatctcggctgactgcaacctctgcctcccagaatatgacagatacctagcatctagcaaaataatggcagctgcttaccttgaccccaacttgaatcacacaccaaattcgagtactaagactcacctgggtactggtatggaacgttctcctggtgcaatggagcgagtattaaaggtctttcattattttgaaagcaatagtgagccaaccacctgggccagtattatcaggcatggagatgctactgatgtcaggggcatcattcagaagatagtggacagtcacaaagtaaagcatgtggcctgctatggattccgcctcagtcacctgcggtcagaggaggttcactggcttcacgtggatatgggcgtctccagtgtgagggagaagtatgagcttgctcacccaccagaggagtggaaatatgaattgagaattcgttatttgccaaaaggatttctaaaccagtttactgaagataagccaactttgaatttcttctatcaacaggtgaagagcgattatatgttagagatagctgatcaagtggaccaggaaattgctttgaagttgggttgtctagaaatacggcgatcatactgggagatgcggggcaatgcactagaaaagaagtctaactatgaagtattagaaaaagatgttggtttaaagcgattttttcctaagagtttactggattctgtcaaggccaaaacactaagaaaactgatccaacaaacatttagacaatttgccaaccttaatagagaagaaagtattctgaaattctttgagatcctgtctccagtctacagatttgataaggaatgcttcaagtgtgctcttggttcaagctggattatttcagtggaactggcaatcggcccagaagaaggaatcagttacctaacggacaagggctgcaatcccacacatcttgctgacttcactcaagtgcaaaccattcagtattcaaacattgaagacaaggacagaaaaggaatgctacaactaaaaatagcaggtgcacccgagcctctgacagtgacggcaccatccctaaccattgcggagaatatggctgacctaatagatgggtactgccggctggtgaatggaacctcgcagtcatttatcatcagacctcagaaagaaggtgaacgggctttgccatcaataccaaagttggccaacagcgaaaagcaaggcatgcggacacacgccgtctctgtgtcagaaacagatgattatgctgagattatagatgaagaagatacttacaccatgccctcaaccagggattatgagattcaaagagaaagaatagaacttggacgatgtattggagaaggccaatttggagatgtacatcaaggcatttatatgagtccagagaatccagctttggcggttgcaattaaaacatgtaaaaactgtacttcggacagcgtgagagagaaatttcttcaagaagccttaacaatgcgtcagtttgaccatcctcatattgtgaagctgattggagtcatcacagagaatcctgtctggataatcatggagctgtgcacacttggagagctgaggtcatttttgcaagtaaggaaatacagtttggatctagcatctttgatcctgtatgcctatcagcttagtacagctcttgcatatctagagagcaaaagatttgtacacagggacattgctgctcggaatgttctggtgtcctcaaatgattgtgtaaaattaggagactttggattatcccgatatatggaagatagtacttactacaaagcttccaaaggaaaattgcctattaaatggatggctccagagtcaatcaattttcgacgttttacctcagctagtgacgtatggatgtttggtgtgtgtatgtgggagatactgatgcatggtgtgaagccttttcaaggagtgaagaacaatgatgtaatcggtcgaattgaaaatggggaaagattaccaatgcctccaaattgtcctcctaccctctacagccttatgacgaaatgctgggcctatgaccccagcaggcggcccaggtttactgaacttaaagctcagctcagcacaatcctggaggaagagaaggctcagcaagaagagcgcatgaggatggagtccagaagacaggccacagtgtcctgggactccggagggtctgatgaagcaccgcccaagcccagcagaccgggttatcccagtccgaggtccagcgaaggattttatcccagcccacagcacatggtacaaaccaatcattaccaggtttctggctaccctggttcacatggaatcacagccatggctggcagcatctatccaggtcaggcatctcttttggaccaaacagattcatggaatcatagacctcaggagatagcaatgtggcagcccaatgtggaggactctacagtattggacctgcgagggattgggcaagtgttgccaacccatctgatggaagagcgtctaatccgacagcaacaggaaatggaagaagatcagcgctggctggaaaaagaggaaagatttctgaaacctgatgtgagactctctcgaggcagtattgacagggaggatggaagtcttcagggtccgattggaaaccaacatatatatcagcctgtgggtaaaccagatcctgcagctccaccaaagaaaccgcctcgccctggagctcccggtcatctgggaagccttgccagcctcagcagccctgctgacagctacaacgagggtgtcaagcttcagccccaggaaatcagcccccctcctactgccaacctggaccggtcgaatgataaggtgtacgagaatgtgacgggcctggtgaaagctgtcatcgagatgtccagtaaaatccagccagccccaccagaggagtatgtccctatggtgaaggaagtcggcttggccctgaggacattattggccactgtggatgagaccattcccctcctaccagccagcacccaccgagagattgagatggcacagaagctattgaactctgacctgggtgagctcatcaacaagatgaaactggcccagcagtatgtcatgaccagcctccagcaagagtacaaaaagcaaatgctgactgctgctcacgccctggctgtggatgccaaaaacttactcgatgtcattgaccaagcaagactgaaaatgcttgggcagacgagaccacactga

SEQ ID NO: 388 - DNA, 3225 bp, Homo sapiens
atgatctcggctgactgcaacctctgcctcccagaatatgacagatacctagcatctagcaaaataatggcagctgcttaccttgaccccaacttgaatcacacaccaaattcgagtactaagactcacctgggtactggtatggaacgttctcctggtgcaatggagcgagtattaaaggtctttcattattttgaaagcaatagtgagccaaccacctgggccagtattatcaggcatggagatgctactgatgtcaggggcatcattcagaagatagtggacagtcacaaagtaaagcatgtggcctgctatggattccgcctcagtcacctgcggtcagaggaggttcactggcttcacgtggatatgggcgtctccagtgtgagggagaagtatgagcttgctcacccaccagaggagtggaaatatgaattgagaattcgttatttgccaaaaggatttctaaaccagtttactgaagataagccaactttgaatttcttctatcaacaggtgaagagcgattatatgttagagatagctgatcaagtggaccaggaaattgctttgaagttgggttgtctagaaatacggcgatcatactgggagatgcggggcaatgcactagaaaagaagtctaactatgaagtattagaaaaagatgttggtttaaagcgattttttcctaagagtttactggattctgtcaaggccaaaacactaagaaaactgatccaacaaacatttagacaatttgccaaccttaatagagaagaaagtattctgaaattctttgagatcctgtctccagtctacagatttgataaggaatgcttcaagtgtgctcttggttcaagctggattatttcagtggaactggcaatcggcccagaagaaggaatcagttacctaacggacaagggctgcaatcccacacatcttgctgacttcactcaagtgcaaaccattcagtattcaaacagtgaagacaaggacagaaaaggaatgctacaactaaaaatagcaggtgcacccgagcctctgacagtgacggcaccatccctaaccattgcggagaatatggctgacctaatagatgggtactgccggctggtgaatggaacctcgcagtcatttatcatcagacctcagaaagaaggtgaacgggctttgccatcaataccaaagttggccaacagcgaaaagcaaggcatgcggacacacgccgtctctgtgtcagaaacagatgattatgctgagattatagatgaagaagatacttacaccatgccctcaaccagggattatgagattcgaagagaaagaatagaacttggacgatgtattggagaaggccaatttggagatgtacatcaaggcatttatatgagtccagagaatccagctttggcggttgcaattaaaacatgtaaaaactgtacttcggacagcgtgagagagaaatttcttcaagaagccttaacaatgcgtcagtttgaccatcctcatattgtgaagctgattggagtcatcacagagaatcctgtctggataatcatggagctgtgcacacttggagagctgaggtcatttttgcaagtaaggaaatacagtttggatctagcatctttgatcctgtatgcctatcagcttagtacagctcttgcatatctagagagcaaaagatttgtacacagggacattgctgctcggaatgttctggtgtcctcaaatgattgtgtaaaattaggagactttggattatcccgatatatggaagatagtacttactacaaagcttccaaaggaaaattgcctattaaatggatggctccagagtcaatcaattttcgacgttttacctcagctagtgacgtatggatgtttggtgtgtgtatgtgggagatactgatgcatggtgtgaagccttttcaaggagtgaagaacaatgatgtaatcggtcgaattgaaaatggggaaagattaccaatgcctccaaattgtcctcctaccctctacagccttatgacgaaatgctgggcctatgaccccagcaggcggcccaggtttactgaacttaaagctcagctcagcacaatcctggaggaagagaaggctcagcaagaagagcgcatgaggatggagtccagaagacaggccacagtgtcctgggactccggagggtctgatgaagcaccgcccaagcccagcagaccgggttatcccagtccgaggtccagcgaaggattttatcccagcccacagcacatggtacaaaccaatcattaccaggtttctggctaccctggttcacatggaatcacagccatggctggcagcatctatccaggtcaggcatctcttttggaccaaacagattcatggaatcatagacctcaggagatagcaatgtggcagcccaatgtggaggactctacagtattggacctgcgagggattgggcaagtgttgccaacccatctgatggaagagcgtctaatccgacagcaacaggaaatggaagaagatcagcgctggctggaaaaagaggaaagatttctgaaacctgatgtgagactctctcgaggcagtattgacagggaggatggaagtcttcagggtccgattggaaaccaacatatatatcagcctgtgggtaaaccagatcctgcagctccaccaaagaaaccgcctcgccctggagctcccggtcatctgggaagccttgccagcctcagcagccctgctgacagctacaacgagggtgtcaagcttcagccccaggaaatcagcccccctcctactgccaacctggaccggtcgaatgataaggtgtacgagaatgtgacgggcctggtgaaagctgtcatcgagatgtccagtaaaatccagccagccccaccagaggagtatgtccctatggtgaaggaagtcggcttggccctgaggacattattggccactgtggatgagaccattcccctcctaccagccagcacccaccgagagattgagatggcacagaagctattgaactctgacctgggtgagctcatcaacaagatgaaactggcccagcagtatgtcatgaccagcctccagcaagagtacaaaaagcaaatgctgactgctgctcacgccctggctgtggatgccaaaaacttactcgatgtcattgaccaagcaagactgaaaatgcttgggcagacgagaccacactga

SEQ ID NO: 389 - DNA, 3225 bp, Homo sapiens
atgatctcggctgactgcaacctctgcctcccagaatatgacagatacctagcatctagcaaaataatggcagctgcttaccttgaccccaacttgaatcacacaccaaattcgagtactaagactcacctgggtactggtatggaacgttctcctggtgcaatggagcgagtattaaaggtctttcattattttgaaagcaatagtgagccaaccacctgggccagtattatcaggcatggagatgctactgatgtcaggggcatcattcagaagatagtggacagtcacaaagtaaagcatgtggcctgctatggattccgcctcagtcacctgcggtcagaggaggttcactggcttcacgtggatatgggcgtctccagtgtgagggagaagtatgagcttgctcacccaccagaggagtggaaatatgaattgagaattcgttatttgccaaaaggatttctaaaccagtttactgaagataagccaactttgaatttcttctatcaacaggtgaagagcgattatatgttagagatagctgatcaagtggaccaggaaattgctttgaagttgggttgtctagaaatacggcgatcatactgggagatgcggggcaatgcactagaaaagaagtctaactatgaagtattagaaaaagatgttggtttaaagcgattttttcctaagagtttactggattctgtcaaggccaaaacactaagaaaactgatccaacaaacatttagacaatttgccaaccttaatagagaagaaagtattctgaaattctttgagatcctgtctccagtctacagatttgataaggaatgcttcaagtgtgctcttggttcaagctggattatttcagtggaactggcaatcggcccagaagaaggaatcagttacctaacggacaagggctgcaatcccacacatcttgctgacttcactcaagtgcaaaccattcagtattcaaacagtgaagacaaggacagaaaaggaatgctacaactaaaaatagcaggtgcacccgagcctctgacagtgacggcaccatccctaaccattgcggagaatatggctgacctaatagatgggtactgccggctggtgaatggaacctcgcagtcatttatcatcagacctcagaaagaaggtgaacgggctttgccatcaataccaaagttggccaacagcgaaaagcaaggcatgcggacacacgccgtctctgtgtcagaaacagatgattatgctgagattatagatgaagaagatacttacaccatgccctcaaccagggattatgagattcaaagagaaagaatagaacttggacgatgtattggagaaggccaatttggagatgtacatcaaggcatttatatgagtccagagaatccagctttggtggttgcaattaaaacatgtaaaaactgtacttcggacagcgtgagagagaaatttcttcaagaagccttaacaatgcgtcagtttgaccatcctcatattgtgaagctgattggagtcatcacagagaatcctgtctggataatcatggagctgtgcacacttggagagctgaggtcatttttgcaagtaaggaaatacagtttggatctagcatctttgatcctgtatgcctatcagcttagtacagctcttgcatatctagagagcaaaagatttgtacacagggacattgctgctcggaatgttctggtgtcctcaaatgattgtgtaaaattaggagactttggattatcccgatatatggaagatagtacttactacaaagcttccaaaggaaaattgcctattaaatggatggctccagagtcaatcaattttcgacgttttacctcagctagtgacgtatggatgtttggtgtgtgtatgtgggagatactgatgcatggtgtgaagccttttcaaggagtgaagaacaatgatgtaatcggtcgaattgaaaatggggaaagattaccaatgcctccaaattgtcctcctaccctctacagccttatgacgaaatgctgggcctatgaccccagcaggcggcccaggtttactgaacttaaagctcagctcagcacaatcctggaggaagagaaggctcagcaagaagagcgcatgaggatggagtccagaagacaggccacagtgtcctgggactccggagggtctgatgaagcaccgcccaagcccagcagaccgggttatcccagtccgaggtccagcgaaggattttatcccagcccacagcacatggtacaaaccaatcattaccaggtttctggctaccctggttcacatggaatcacagccatggctggcagcatctatccaggtcaggcatctcttttggaccaaacagattcatggaatcatagacctcaggagatagcaatgtggcagcccaatgtggaggactctacagtattggacctgcgagggattgggcaagtgttgccaacccatctgatggaagagcgtctaatccgacagcaacaggaaatggaagaagatcagcgctggctggaaaaagaggaaagatttctgaaacctgatgtgagactctctcgaggcagtattgacagggaggatggaagtcttcagggtccgattggaaaccaacatatatatcagcctgtgggtaaaccagatcctgcagctccaccaaagaaaccgcctcgccctggagctcccggtcatctgggaagccttgccagcctcagcagccctgctgacagctacaacgagggtgtcaagcttcagccccaggaaatcagcccccctcctactgccaacctggaccggtcgaatgataaggtgtacgagaatgtgacgggcctggtgaaagctgtcatcgagatgtccagtaaaatccagccagccccaccagaggagtatgtccctatggtgaaggaagtcggcttggccctgaggacattattggccactgtggatgagaccattcccctcctaccagccagcacccaccgagagattgagatggcacagaagctattgaactctgacctgggtgagctcatcaacaagatgaaactggcccagcagtatgtcatgaccagcctccagcaagagtacaaaaagcaaatgctgactgctgctcacgccctggctgtggatgccaaaaacttactcgatgtcattgaccaagcaagactgaaaatgcttgggcagacgagaccacactga

SEQ ID NO: 390 - DNA, 3225 bp, Homo sapiens
atgatctcggctgactgcaacctctgcctcccagaatatgacagatacctagcatctagcaaaataatggcagctgcttaccttgaccccaacttgaatcacacaccaaattcgagtactaagactcacctgggtactggtatggaacgttctcctggtgcaatggagcgagtattaaaggtctttcattattttgaaagcaatagtgagccaaccacctgggccagtattatcaggcatggagatgctactgatgtcaggggcatcattcagaagatagtggacagtcacaaagtaaagcatgtggcctgctatggattccgcctcagtcacctgcggtcagaggaggttcactggcttcacgtggatatgggcgtctccagtgtgagggagaagtatgagcttgctcacccaccagaggagtggaaatatgaattgagaattcgttatttgccaaaaggatttctaaaccagtttactgaagataagccaactttgaatttcttctatcaacaggtgaagagcgattatatgttagagatagctgatcaagtggaccaggaaattgctttgaagttgggttgtctagaaatacggcgatcatactgggagatgcggggcaatgcactagaaaagaagtctaactatgaagtattagaaaaagatgttggtttaaagcgattttttcctaagagtttactggattctgtcaaggccaaaacactaagaaaactgatccaacaaacatttagacaatttgccaaccttaatagagaagaaagtattctgaaattctttgagatcctgtctccagtctacagatttgataaggaatgcttcaagtgtgctcttggttcaagctggattatttcagtggaactggcaatcggcccagaagaaggaatcagttacctaacggacaagggctgcaatcccacacatcttgctgacttcactcaagtgcaaaccattcagtattcaaacagtgaagacaaggacagaaaaggaatgctacaactaaaaatagcaggtgcacccgagcctctgacagtgacggcaccatccctaaccattgcggagaatatggctgacctaatagatgggtactgccggctggtgaatggaacctcgcagtcatttatcatcagacctcagaaagaaggtgaacgggctttgccatcaataccaaagttggccaacagcgaaaagcaaggcatgcggacacacgccgtctctgtgtcagaaacagatgattatgctgagattatagatgaagaagatacttacaccatgccctcaaccagggattatgagattcaaagagaaagaatagaacttggacgatgtattggagaaggccaatttggagatgtacatcaaggcatttatatgagtccagagaatccagctttggcggttgcaattaaaacatgtaaaaactgtacttcggacagcgtgagagagaaatttcttcaagaagccttaacaatgcgtcagtttgaccatcctcatattgtgaagctgattggagtcatcacagagaatcctgtctggataatcatggagctgtgcacacttggagagctgaggtcatttttgcaagtaaggaaatacagtttggatctagcatctttgatcctgtatgcctatcagcttagtacagctcttgcatatctagagagcaaaagatttgtacacagggacattgctgctcggaatgttctggtgtcctcaaatgattgtgtaaaattaggagactttggattatcccgatatatggaagatagtacttactacaaagcttccaaaggaaaattgcctattaaatggatggctccagagtcaatcaattttcgacgttttacctcagctagtgacgtatggatgtttggtgtgtgtatgtgggagatactgatgcatggtgtgaagccttttcaaggagtgaagaacaatgatgtaatcggtcgaattgaaaatggggaaagattaccaatgcctccaaattgtcctcctaccctctacagccttatgacgaaatgctgggcctatgaccccagcaggcggcccaggtttactgaacttaaagctcagctcagcacaatcctggaggaagagaaggctcagcaagaagagcgcatgaggatggagtccagaagacaggccacagtgtcctgggactccggagggtctgatgaagcaccgcccaagcccagcagaccgggttatcccagtccgaggtccagcgaaggattttatcccagcccacagcacatggtacaaaccaatcattaccaggtttctggctaccctggttcacatggaatcacagccatggctggcagcatctatccaggtcaggcatctcttttggaccaaacagattcatggaatcatagacctcaggagatagcaatgtggcagcccaatgtggaggactctacagtattggacctgcgagggattgggcaagtgttgccaacccatctgatggaagagcgtctaatccgacagcaacaggaaatggaagaagatcagcgctggctggaaaaagaggaaagatttctgaaacctgatgtgagactctctcgaggcagtattgacagggaggatggaagtcttcagggtccgattggaaaccaacatatatatcagcctgtgggtaaaccagatcctgcagctccaccaaagaaaccgcctcgctctggagctcccggtcatctgggaagccttgccagcctcagcagccctgctgacagctacaacgagggtgtcaagcttcagccccaggaaatcagcccccctcctactgccaacctggaccggtcgaatgataaggtgtacgagaatgtgacgggcctggtgaaagctgtcatcgagatgtccagtaaaatccagccagccccaccagaggagtatgtccctatggtgaaggaagtcggcttggccctgaggacattattggccactgtggatgagaccattcccctcctaccagccagcacccaccgagagattgagatggcacagaagctattgaactctgacctgggtgagctcatcaacaagatgaaactggcccagcagtatgtcatgaccagcctccagcaagagtacaaaaagcaaatgctgactgctgctcacgccctggctgtggatgccaaaaacttactcgatgtcattgaccaagcaagactgaaaatgcttgggcagacgagaccacactga

SEQ ID NO: 391 - DNA, 2469 bp, Homo sapiens
atggggtttgggagtgacctgaagaattcacatgaagcagtgttaaaattgcaagactgggaattacggttactggaaacagtaaagaaatttatggccctgagaataaaaagtgataaagaatatgcatctactttacagaacctttgtaatcaagttgataaggaaagtactgtccaaatgaattatgtcagcaacgtatccaagtcttggctacttatgattcagcagacagaacaacttagtaggataatgaagacacatgcagaggacttgaactctggacctttacacaggctcaccatgatgattaaggacaagcagcaggtgaagaaaagttacataggtgttcatcagcagatagaggcagagatgatcaaggttaccaaaacagaattggagaagttaaaatgcagctatagacaattaataaaagaaatgaattctgccaaagagaaatataaagaagctttagctaaagggaaggaaactgaaaaggccaaggaacgatacgacaaagccacaatgaaacttcatatgttgcacaatcagtatgtattggcgttgaaaggggcacagctccatcagaatcagtattatgatatcacacttcccctgcttctggactccttacaaaagatgcaagaagaaatgataaaagcactcaaaggtatatttgatgaatacagccagataaccagtcttgtcacagaggaaacagtgaatgtccataaagagattcaaatgtcggttgaacagatagatcctagtacagaatacaataatttcatagatgttcacagaacaacggctgctaaagaacaagaaatagagtttgatacttccttactggaagaaaatgaaaatcttcaggcaaatgagatcatgtggaataacttaacagcagaaagtttgcaagtaatgttgaaaacgttagcggaagaacttatgcaaacacagcagatgcttttaaacaaggaggaggctgttttggagttagagaagagaattgaagaatcttctgaaacttgtgagaagaagtctgatattgtgcttctgctaagccaaaaacaggcacttgaagaactgaaacagtcagtccagcagctgagatgcactgaagcaaagttttcagcacagaaggaattactagagcaaaaagtgcaagaaaatgatgggaaagagccacctccagtagtaaattatgaagaagatgcacgatcagttacatctatggaaagaaaggagaggctatccaaatttgaatctattcgtcattcaattgctggaataattaggtctccaaaatctgcagtgggctcttcagcactttctgatatgatctccatcagtgagaagcctttggcagaacaggactggtaccatggtgcaattcccagaatagaagctcaagaactgttaaaaaaacaaggagactttttggtgcgagagagtcatgggaaacctggtgaatatgtcctttctgtatattctgatggacagaggagacattttatcatacaatatgttgataacatgtatcgattcgagggcactgggttttcaaacattcctcaacttatagatcatcactatacaacaaaacaggtcatcactaagaaatcaggtgtagttctgctgaatcctattcctaaggacaagaaatggattctcagtcatgaagatgtcatattgggagaattactgggcaagggaaattttggtgaagtatataagggcacattaaaggataaaacttctgttgctgttaaaacatgtaaagaagatcttcctcaggaattgaaaataaaatttttacaagaagccaaaattctcaagcaatatgatcatcccaatattgtcaaacttataggagtttgcacacaaagacagcctgtctacatcattatggaactggtttcaggaggtgatttcctcacctttctgagaaggaagaaggatgaactaaaactcaaacagttagtgaaattttcattagacgctgctgctggtatgttgtatctcgagagtaaaaactgtatacacagggaccttgctgcaagaaactgcctggtaggtgaaaataatgttctgaaaatcagtgactttggaatgtctcgtcaagaggatggtggagtgtattcatcttctggcttaaagcagattcccattaaatggacagcaccggaagctcttaattatgggagatacagttcagagagtgacgtgtggagctttggcatccttctctgggagaccttcagcttaggggtttgtccgtaccctggaatgacaaatcagcaagcaagagagcaagtagaaagaggataccggatgtcagctccccagcactgtccagaggatatttccaaaatcatgatgaagtgttgggattataaacctgaaaatcgccctaagttcagtgaacttcagaaagagctcactatcatcaagagaaaactcacatag

SEQ ID NO: 392 - DNA, 2469 bp, Homo sapiens
atggggtttgggagtgacctgaagaattcacatgaagcagtgttaaaattgcaagactgggaattacggttactggaaacagtaaagaaatttatggccctgagaataaaaagtgataaagaatatgcatctactttacagaacctttgtaatcaagttgataaggaaagtactgtccaaatgaattatgtcagcaacgtatccaagtcttggctacttatgattcagcagacagaacaacttagtaggataatgaagacacatgcagaggacttgaactctggacctttacacaggctcaccatgatgattaaggacaagcagcaggtgaagaaaagttacataggtgttcatcagcagatagaggcagagatgatcaaggttaccaaaacagaattggagaagttaaaatgcagctatagacaattaataaaagaaatgaattctgccaaagagaaatataaagaagctttagctaaagggaaggaaactgaaaaggccaaggaacgatacgacaaagccacaatgaaacttcatatgttgcacaatcagtatgtattggcgttgaaaggggcacagctccatcagaatcagtattatgatatcacacttcccctgcttctggactccttacaaaagatgcaagaagaaatgataaaagcactcaaaggtatatttgatgaatacagccagataaccagtcttgtcacagaggaaatagtgaatgtccataaagagattcaaatgtcggttgaacagatagatcctagtacagaatacaataatttcatagatgttcacagaacaacggctgctaaagaacaagaaatagagtttgatacttccttactggaagaaaatgaaaatcttcaggcaaatgagatcatgtggaataacttaacagcagaaagtttgcaagtaatgttgaaaacgttagcggaagaacttatgcaaacacagcagatgcttttaaacaaggaggaggctgttttggagttagagaagagaattgaagaatcttctgaaacttgtgagaagaagtctgatattgtgcttctgctaagccaaaaacaggcacttgaagaactgaaacagtcagtccagcagctgagatgcactgaagcaaagttttcagcacagaaggaattactagagcaaaaagtgcaagaaaatgatgggaaagagccacctccagtagtaaattatgaagaagatgcacgatcagttacatctatggaaagaaaggagaggctatccaaatttgaatctattcgtcattcaattgctggaataattaggtctccaaaatctgcagtgggctcttcagcactttctgatatgatctccatcagtgagaagcctttggcagaacaggactggtaccatggtgcaattcccagaatagaagctcaagaactgttaaaaaaacaaggagactttttggtgcgagagagtcatgggaaacctggtgaatatgtcctttctgtatattctgatggacagaggagacattttatcatacaatatgttgataacatgtatcgattcgagggcactgggttttcaaacattcctctacttatagatcatcactatacaacaaaacaggtcatcactaagaaatcaggtgtagttctgctgaatcctattcctaaggacaagaaatggattctcagtcatgaagatgtcatattgggagaattactgggcaagggaaattttggtgaagtatataagggcacattaaaggataaaacttctgttgctgttaaaacatgtaaagaagatcttcctcaggaattgaaaataaaatttttacaagaagccaaaattctcaagcaatatgatcatcccaatattgtcaaacttataggagtttgcacacaaagacagcctgtctacatcattatggaactggtttcaggaggtgatttcctcacctttctgagaaggaagaaggatgaactaaaactcaaacagttagtgaaattttcattagacgctgctgctggtatgttgtatctcgagagtaaaaactgtatacacagggaccttgctgcaagaaactgcctggtaggtgaaaataatgttctgaaaatcagtgactttggaatgtctcgtcaagaggatggtggagtgtattcatcttctggcttaaagcagattcccattaaatggacagcaccggaagctcttaattatgggagatacagttcagagagtgacgtgtggagctttggcatccttctctgggagaccttcagcttaggggtttgtccgtaccctggaatgacaaatcagcaagcaagagagcaagtagaaagaggataccggatgtcagctccccagcactgtccagaggatatttccaaaatcatgatgaagtgttgggattataaacctgaaaatcgccctaagttcagtgaacttcagaaagagctcactatcatcaagagaaaactcacatag

SEQ ID NO: 393 - DNA, 2469 bp, Homo sapiens
atggggtttgggagtgacctgaagaattcacatgaagcagtgttaaaattgcaagactgggaattacggttactggaaacagtaaagaaatttatggccctgagaataaaaagtgataaagaatatgcatctactttacagaacctttgtaatcaagttgataaggaaagtactgtccaaatgaattatgtcagcaacgtatccaagtcttggctacttatgattcagcagacagaacaacttagtaggataatgaagacacatgcagaggacttgaactctggacctttacacaggctcaccatgatgattaaggacaagcagcaggtgaagaaaagttacataggtgttcatcagcagatagaggcagagatgatcaaggttaccaaaacagaattggagaagttaaaatgcagctatagacaattaataaaagaaatgaattctgccaaagagaaatataaagaagctttagctaaagggaaggaaactgaaaaggccaaggaacgatacgacaaagccacaatgaaacttcatatgttgcacaatcagtatgtattggcgttgaaaggggcacagctccatcagaatcagtattatgatatcacacttcccctgcttctggactccttacaaaagatgcaagaagaaatgataaaagcactcaaaggtatatttgatgaatacagccagataaccagtcttgtcacagaggaaatagtgaatgtccataaagagattcaaatgtcggttgaacagatagatcctagtacagaatacaataatttcatagatgttcacagaacaacggctgctaaagaacaagaaatagagtttgatacttccttactggaagaaaatgaaaatcttcaggcaaatgagatcatgtggaataacttaacagcagaaagtttgcaagtaatgttgaaaacgttagcggaagaacttatgcaaacacagcagatgcttttaaacaaggaggaggctgttttggagttagagaagagaattgaagaatcttctgaaacttgtgagaagaagtctgatattgtgcttctgctaagccaaaaacaggcacttgaagaactgaaacagtcagtccagcagctgagatgcactgaagcaaagttttcagcacagaaggaattactagagcaaaaagtgcaagaaaatgatgggaaagagccacctccagtagtaaattatgaagaagatgcacgatcagttacatctatggaaagaaaggagaggctatccaaatttgaatctattcgtcattcaattgctggaataattaggtctccaaaatctgcagtgggctcttcagcactttctgatatgatctccatcagtgagaagcctttggcagaacaggactggtaccatggtgcaattcccagaatagaagctcaagaactgttaaaaaaacaaggagactttttggtgcgagagagtcatgggaaacctggtgaatatgtcctttctgtatattctgatggacagaggagacattttatcatacaatatgttgataacatgtatcgattcgagggcactgggttttcaaacattcctcaacttatagatcatcactatacaacaaaacaggtcatcactaagaaatcaggtgtagttctgctgaatcctattcctaaggacaagaaatggattctcagtcatgaagatgtcatattgggagaattactgggcaagggaaattttggtgaagtatataagggcacattaaaggataaaacttctgttgctgttaaaacatgtaaagaagatcttcctcgggaattgaaaataaaatttttacaagaagccaaaattctcaagcaatatgatcatcccaatattgtcaaacttataggagtttgcacacaaagacagcctgtctacatcattatggaactggtttcaggaggtgatttcctcacctttctgagaaggaagaaggatgaactaaaactcaaacagttagtgaaattttcattagacgctgctgctggtatgttgtatctcgagagtaaaaactgtatacacagggaccttgctgcaagaaactgcctggtaggtgaaaataatgttctgaaaatcagtgactttggaatgtctcgtcaagaggatggtggagtgtattcatcttctggcttaaagcagattcccattaaatggacagcaccggaagctcttaattatgggagatacagttcagagagtgacgtgtggagctttggcatccttctctgggagaccttcagcttaggggtttgtccgtaccctggaatgacaaatcagcaagcaagagagcaagtagaaagaggataccggatgtcagctccccagcactgtccagaggatatttccaaaatcatgatgaagtgttgggattataaacctgaaaatcgccctaagttcagtgaacttcagaaagagctcactatcatcaagagaaaactcacatag

SEQ ID NO: 394 - DNA, 2469 bp, Homo sapiens
atgggcttctcttccgagctgtgcagcccccagggccacggggtcctgcagcaaatgcaggaggccgagcttcgtctactggagggcatgagaaagtggatggcccagcgggtcaagagtgacagggagtatgcaggactgcttcaccacatgtccctgcaggacagtgggggccagagccgggccatcagccctgacagccccatcagtcagtcctgggctgagatcaccagccaaactgagggcctgagccgcttgctgcggcagcacgcagaggatctgaactcagggcccctgagcaagctgagcctgctcatccgggaacggcagcagcttcgcaagacctacagcgagcagtggcagcagctgcagcaggagctcaccaagacccacagccaggacattgagaagctgaagagccagtaccgagctctggcacgggacagtgcccaagccaagcgcaagtaccaggaggccagcaaagacaaggaccgtgacaaggccaaggacaagtatgtgcgcagcctgtggaagctctttgctcaccacaaccgctatgtgctgggcgtgcgggctgcgcagctacaccaccagcaccaccaccagctcctgctgcccggcctgctgcggtcactgcaggacctgcacgaggagatggcttgcatcctgaaggagatcctgcaggaatacctggagattagcagcctggtgcaggatgaggtggtggccattcaccgggagatggctgcagctgctgcccgcatccagcctgaggctgagtaccaaggcttcctgcgacagtatgggtccgcacctgacgtcccaccctgtgtcacgttcgatgagtcactgcttgaggagggtgaaccgctggagcctggggagctccagctgaacgagctgactgtggagagcgtgcagcacacgctgacctcagtgacagatgagctggctgtggccaccgaggtggtgttcaggcggcaggagatggttacgcagctgcaacaggagctccggaatgaagaggagaacacccacccccgggagcgggtgcagctgctgggcaagaggcaagtgctgcaagaagcactgcaggggctgcaggtagcgctgtgcagccaggccaagctgcaggcccagcaggagttgctgcagaccaagctggagcacctgggccccggcgagcccccgcctgtgctgctcctgcaggatgaccgccactccacgtcgtcctcggagcaggagcgagaggggggaaggacacccacgctggagatccttaagagccacatctcaggaatcttccgccccaagttctcgctccctccaccgctgcagctcattccggaggtgcagaagcccctgcatgagcagctgtggtaccacggggccatcccgagggcagaggtggctgagctgctggtgcactctggggacttcctggtgcgggagagccagggcaagcaggagtacgtgctgtcggtgctgtgggatggtctgccccggcacttcatcatccagtccttggataacctgtaccgactggaaggggaaggctttcctagcattcctttgctcatcgaccacctactgagcacccagcagcccctcaccaagaagagtggtgttgtcctgcacagggctgtgcccaaggacaagtgggtgctgaaccatgaggacctggtgttgggtgagcagattggacgggggaactttggcgaagtgttcagcggacgcctgcgagccgacaacaccctggtggcggtgaagtcttgtcgagagacgctcccacctgacctcaaggccaagtttctacaggaagcgaggatcctgaagcagtacagccaccccaacatcgtgcgtctcattggtgtctgcacccagaagcagcccatctacatcgtcatggagcttgtgcaggggggcgacttcctgaccttcctccgcacggagggggcccgcctgcgggtgaagactctgctgcagatggtgggggatgcagctgctggcatggagtacctggagagcaagtgctgcatccaccgggacctggctgctcggaactgcctggtgacagagaagaatgtcctgaagatcagtgactttgggatgtcccgagaggaagccgatggggtctatgcagcctcagggggcctcagacaagtccccgtgaagtggaccgcacctgaggcccttaactacggccgctactcctccgaaagcgacgtgtggagctttggcatcttgctctgggagaccttcagcctgggggcctccccctatcccaacctcagcaatcagcagacacgggagtttgtggagaaggggggccgtctgccctgcccagagctgtgtcctgatgccgtgttcaggctcatggagcagtgctgggcctatgagcctgggcagcggcccagcttcagcaccatctaccaggagctgcagagcatccgaaagcggcatcggtga

SEQ ID NO: 395 - DNA, 2469 bp, Homo sapiens
atgggcttctcttccgagctgtgcagcccccagggccacggggtcctgcagcaaatgcaggaggccgagcttcgtctactggagggcatgagaaagtggatggcccagcgggtcaagagtgacagggagtatgcaggactgcttcaccacatgtccctgcaggacagtgggggccagagccgggccatcagccctgacagccccatcagtcagtcctgggctgagatcaccagccaaactgagggcctgagccgcttgctgcggcagcacgcagaggatctgaactcagggcccctgagcaagctgagcctgctcatccgggaacggcagcagcttcgcaagacctacagcgagcagtggcagcagctgcagcaggagctcaccaagacccacagccaggacattgagaagctgaagagccagtaccgagctctggcacgggacagtgcccaagccaagcgcaagtaccaggaggccagcaaagacaaggaccgtgacaaggccaaggacaagtatgtgcgcagcctgtggaagctctttgctcaccacaaccgctatgtgctgggcgtgcgggctgcgcagctacaccaccagcaccaccaccagctcctgctgcccggcctgctgcggtcactgcaggacctgcacgaggagatggcttgcatcctgaaggagatcctgcaggaatacctggagattagcagcctggtgcaggatgaggtggtggccattcaccgggagatggctgcagctgctgcccgcatccagcctgaggctgagtaccaaggcttcctgcgacagtatgggtccgcacctgacgtcccaccctgtgtcacgttcgatgagtcactgcttgaggagggtgaaccgctggagcctggggagctccagctgaacgagctgactgtggagagcgtgcagcacacgctgacctcagtgacagatgagctggctgtggccaccgagatggtgttcaggcggcaggagatggttacgcagctgcaacaggagctccggaatgaagaggagaacacccacccccgggagcgggtgcagctgctgggcaagaggcaagtgctgcaagaagcactgcaggggctgcaggtagcgctgtgcagccaggccaagctgcaggcccagcaggagttgctgcagaccaagctggagcacctgggccccggcgagcccccgcctgtgctgctcctgcaggatgaccgccactccacgtcgtcctcggagcaggagcgagaggggggaaggacacccacgctggagatccttaagagccacatctcaggaatcttccgccccaagttctcgctccctccaccgctgcagctcattccggaggtgcagaagcccctgcatgagcagctgtggtaccacggggccatcccgagggcagaggtggctgagctgctggtgcactctggggacttcctggtgcgggagagccagggcaagcaggagtacgtgctgtcggtgctgtgggatggtctgccccggcacttcatcatccagtccttggataacctgtaccgactggaaggggaaggctttcctagcattcctttgctcatcgaccacctactgagcacccagcagcccctcaccaagaagagtggtgttgtcctgcacagggctgtgcccaaggacaagtgggtgctgaaccatgaggacctggtgttgggtgagcagattggacgggggaactttggcgaagtgttcagcggacgcctgcgagccgacaacaccctggtggcggtgaagtcttgtcgagagacgctcccacctgacctcaaggccaagtttctacaggaagcgaggatcctgaagcagtacagccaccccaacatcgtgcgtctcattggtgtctgcacccagaagcagcccatctacatcgtcatggagcttgtgcaggggggcgacttcctgaccttcctccgcacggagggggcccgcctgcgggtgaagactctgctgcagatggtgggggatgcagctgctggcatggagtacctggagagcaagtgctgcatccaccgggacctggctgctcggaactgcatggtgacagagaagaatgtcctgaagatcagtgactttgggatgtcccgagaggaagccgatggggtctatgcagcctcagggggcctcagacaagtccccgtgaagtggaccgcacctgaggcccttaactacggccgctactcctccgaaagcgacgtgtggagctttggcatcttgctctgggagaccttcagcctgggggcctccccctatcccaacctcagcaatcagcagacacgggagtttgtggagaaggggggccgtctgccctgcccagagctgtgtcctgatgccgtgttcaggctcatggagcagtgctgggcctatgagcctgggcagcggcccagcttcagcaccatctaccaggagctgcagagcatccgaaagcggcatcggtga

SEQ ID NO: 396 - DNA, 2469 bp, Homo sapiens
atgggcttctcttccgagctgtgcagcccccagggccacggggtcctgcagcaaatgcaggaggccgagcttcgtctactggagggcatgagaaagtggatggcccagcgggtcaagagtgacagggagtatgcaggactgcttcaccacatgtccctgcaggacagtgggggccagagccgggccatcagccctgacagccccatcagtcagtcctgggctgagatcaccagccaaactgagggcctgagccgcttgctgcggcagcacgcagaggatctgaactcagggcccctgagcaagctgagcctgctcatccgggaacggcagcagcttcgcaagacctacagcgagcagtggcagcagctgcagcaggagctcaccaagacccacagccaggacattgagaagctgaagagccagtaccgagctctggcacgggacagtgcccaagccaagcgcaagtaccaggaggccagcaaagacaaggaccgtgacaaggccaaggacaagtatgtgcgcagcctgtggaagctctttgctcaccacaaccgctatgtgctgggcgtgcgggctgcgcagctacaccaccagcaccaccaccagctcctgctgcccggcctgctgcggtcactgcaggacctgcacgaggagatggcttgcatcctgaaggagatcctgcaggaatacctggagattagcagcctggtgcaggatgaggtggtggccattcaccgggagatggctgcagctgctgcccgcatccagcctgaggctgagtaccaaggcttcctgcgacagtatgggtccgcacctgacgtcccaccctgtgtcacgttcgatgagtcactgcttgaggagggtgaaccgctggagcctggggagctccagctgaacgagctgactgtggagagcgtgcagcacacgctgacctcagtgacagatgagctggctgtggccaccgagatggtgttcaggcggcaggagatggttacgcagctgcaacaggagctccggaatgaagaggagaacacccacccccgggagcgggtgcagctgctgggcaagaggcaagtgctgcaagaagcactgcaggggctgcaggtagcgctgtgcagccaggccaagctgcaggcccagcaggagttgctgcagaccaagctggagcacctgggccccggcgagcccccgcctgtgctgctcctgcaggatgaccgccactccacgtcgtcctcggagcaggagcgagaggggggaaggacacccacgctggagatccttaagagccacatctcaggaatcttccgccccaagttctcgctccctccaccgctgcagctcattccggaggtgcagaagcccctgcatgagcagctgtggtaccacggggccatcccgagggcagaggtggctgagctgctggtgcactctggggacttcctggtgcgggagagccagggcaagcaggagtacgtgctgtcggtgctgtgggatggtctgccccggcacttcatcatccagtccttggataacctgtaccgactggaaggggaaggctttcctagcattcctttgctcatcgaccacctactgagcacccagcagcccctcaccaagaagagtggtgttgtcctgcacagggctgtgcccaaggacaagtgggtgctgaaccatgaggacctggtgttgggtgagcagattggacgggggaactttggcgaagtgttcagcggacgcctgcgagccgacaacaccctggtggcggtgaagtcttgtcgagagacgctcccacctgacctcaaggccaagtttctacaggaagcgaggatcctgaagcagtacagccaccccaacatcgtgcgtctcattggtgtctgcacccagaagcagcccatctacatcgtcatggagcttgtgcaggggggcgacttcctgaccttcctccgcacggagggggcccgcctgcgggtgaagactctgctgcagatggtgggggatgcagctgctggcatggagtacctggagagcaagtgctgcatccaccgggacctggctgctcggaactgcctggtgacagagaagaatgtcctgaagatcagtgactttgggatgtcccgagaggaagccgatggggtctatgcagcctcagggggcctcagacaagtccccatgaagtggaccgcacctgaggcccttaactacggccgctactcctccgaaagcgacgtgtggagctttggcatcttgctctgggagaccttcagcctgggggcctccccctatcccaacctcagcaatcagcagacacgggagtttgtggagaaggggggccgtctgccctgcccagagctgtgtcctgatgccgtgttcaggctcatggagcagtgctgggcctatgagcctgggcagcggcccagcttcagcaccatctaccaggagctgcagagcatccgaaagcggcatcggtga

SEQ ID NO: 397 - DNA, 2469 bp, Homo sapiens
atgtggagctggaagtgcctcctcttctgggctgtgctggtcacagccacactctgcaccgctaggccgtccccgaccttgcctgaacaagcccagccctggggagcccctgtggaagtggagtccttcctggtccaccccggtgacctgctgcagcttcgctgtcggctgcgggacgatgtgcagagcatcaactggctgcgggacggggtgcagctggcggaaagcaaccacacccgcatcacaggggaggaggtggaggtgcaggactccgtgcccgcagactccggcctctatgcttgcgtaaccagcagcccctcgggcagtgacaccacctacttctccgtcaatgtttcagatgctctcccctcctcggaggatgatgatgatgatgatgactcctcttcagaggagaaagaaacagataacaccaaaccaaaccgtatgcccgtagctccatattggacatccccagaaaagatggaaaagaaattgcatgcagtgccggctgccaagacagtgaagttcaaatgcccttccagtgggaccccaaaccccacactgcgctggttgaaaaatggcaaagaattcaaacctgaccacagaattggaggctacaaggtccgttatgccacctggagcatcataatggactctgtggtgccctctgacaagggcaactacacctgcattgtggagaatgagtacggcagcatcaaccacacataccagctggatgtcgtggagcggtcccctcaccggcccatcctgcaagcagggttgcccgccaacaaaacagtggccctgggtagcaacgtggagttcatgtgtaaggtgtacagtgacccgcagccgcacatccagtggctaaagcacatcgaggtgaatgggagcaagattggcccagacaacctgccttatgtccagatcttgaagactgctggagttaataccaccgacaaagagatggaggtgcttcacttaagaaatgtctcctttgaggacgcaggggagtatacgtgcttggcgggtaactctatcggactctcccatcactctgcatggttgaccgttctggaagccctggaagagaggccggcagtgatgacctcgcccctgtacctggagatcatcatctattgcacaggggccttcctcatctcctgcatggtggggtcggtcatcgtctacaagatgaagagtggtaccaagaagagtgacttccacagccagatggctgtgcacaagctggccaagagcatccctctgcgcagacaggtaacagtgtctgctgactccagtgcatccatgaactctggggttcttctggttcggccatcacggctctcctccagtgggactcccatgctagcaggggtctctgagtatgagcttcccgaagaccctcgctgggagctgcctcgggacagactggtcttaggcaaacccctgggagagggctgctttgggcaggtggtgttggcagaggctatcgggctggacaaggacaaacccaaccgtgtgaccaaagtggctgtgaagatgttgaagtcggacgcaacagagaaagacttgtcagacctgatctcagaaatggagatgatgaagatgatcgggaagcataagaatatcatcaacctgctgggggcctgcacgcaggatggtcccttgtatgtcatcgtggagtatgcctccaagggcaacctgcgggagtacctgcaggcccggaggcccccagggctggaatactgctacaaccccagccacaacccagaggagcagctctcctccaaggacctggtgtcctgcgcctaccaggtggcccgaggcatggagtatctggcctccaagaagtgcatacaccgagacctggcagccaggaatgtcctggtgacagaggacaatgtgatgaagatagcagactttggcctcgcacgggacattcaccacatcgactactataaaaagacaaccaacggccgactgcctgtgaagtggatggcacccgaggcattatttgaccggatctacacccaccagagtgatgtgtggtctttcggggtgctcctgtgggagatcttcactctgggcggctccccataccccggtgtgcctgtggaggaacttttcaagctgctgaaggagggtcaccgcatggacaagcccagtaactgcaccaacgagctgtacatgatgatgcgggactgctggcatgcagtgccctcacagagacccaccttcaagcagctggtggaagacctggaccgcatcgtggccttgacctccaaccaggagtacctggacctgtccatgcccctggaccagtactcccccagctttcccgacacccggagctctacgtgctcctcaggggaggattccgtcttctctcatgagccgctgcccgaggagccctgcctgccccgacacccagcccagcttgccaatggcggactcaaacgccgctga

SEQ ID NO: 398 - DNA, 2469 bp, Homo sapiens
atgtggagctggaagtgcctcctcttctgggctgtgctggtcacagccacactctgcaccgctaggccgtccccgaccttgcctgaacaagcccagccctggggagcccctgtggaagtggagtccttcctggtccaccccggtgacctgctgcagcttcgctgtcggctgcgggacgatgtgcagagcatcaactggctgcgggacggggtgcagctggcggaaagcaaccgcacccgcatcacaggggaggaggtggaggtgcaggactccgtgcccgcagactccggcctctatgcttgcgtaaccagcagcccctcgggcagtgacaccacctacttctccgtcaatgtttcagatgctctcccctcctcggaggatgatgatgatgatgatgactcctcttcagaggagaaagaaacagataacaccaaaccaaaccgtatgcccgtagctccatattggacatccccagaaaagatggaaaagaaattgcatgcagtgccggctgccaagacagtgaagttcaaatgcccttccagtgggaccccaaaccccacactgcgctggttgaaaaatggcaaagaattcaaacctgaccacagaattggaggctacaaggtccgttatgccacctggagcatcataatggactctgtggtgccctctgacaagggcaactacacctgcattgtggagaatgagtacggcagcatcaaccacacataccagctggatgtcgtggagcggtcctctcaccggcccatcctgcaagcagggttgcccgccaacaaaacagtggccctgggtagcaacgtggagttcatgtgtaaggtgtacagtgacccgcagccgcacatccagtggctaaagcacatcgaggtgaatgggagcaagattggcccagacaacctgccttatgtccagatcttgaagactgctggagttaataccaccgacaaagagatggaggtgcttcacttaagaaatgtctcctttgaggacgcaggggagtatacgtgcttggcgggtaactctatcggactctcccatcactctgcatggttgaccgttctggaagccctggaagagaggccggcagtgatgacctcgcccctgtacctggagatcatcatctattgcacaggggccttcctcatctcctgcatggtggggtcggtcatcgtctacaagatgaagagtggtaccaagaagagtgacttccacagccagatggctgtgcacaagctggccaagagcatccctctgcgcagacaggtaacagtgtctgctgactccagtgcatccatgaactctggggttcttctggttcggccatcacggctctcctccagtgggactcccatgctagcaggggtctctgagtatgagcttcccgaagaccctcgctgggagctgcctcgggacagactggtcttaggcaaacccctgggagagggctgctttgggcaggtggtgttggcagaggctatcgggctggacaaggacaaacccaaccgtgtgaccaaagtggctgtgaagatgttgaagtcggacgcaacagagaaagacttgtcagacctgatctcagaaatggagatgatgaagatgatcgggaagcataagaatatcatcaacctgctgggggcctgcacgcaggatggtcccttgtatgtcatcgtggagtatgcctccaagggcaacctgcgggagtacctgcaggcccggaggcccccagggctggaatactgctacaaccccagccacaacccagaggagcagctctcctccaaggacctggtgtcctgcgcctaccaggtggcccgaggcatggagtatctggcctccaagaagtgcatacaccgagacctggcagccaggaatgtcctggtgacagaggacaatgtgatgaagatagcagactttggcctcgcacgggacattcaccacatcgactactataaaaagacaaccaacggccgactgcctgtgaagtggatggcacccgaggcattatttgaccggatctacacccaccagagtgatgtgtggtctttcggggtgctcctgtgggagatcttcactctgggcggctccccataccccggtgtgcctgtggaggaacttttcaagctgctgaaggagggtcaccgcatggacaagcccagtaactgcaccaacgagctgtacatgatgatgcgggactgctggcatgcagtgccctcacagagacccaccttcaagcagctggtggaagacctggaccgcatcgtggccttgacctccaaccaggagtacctggacctgtccatgcccctggaccagtactcccccagctttcccgacacccggagctctacgtgctcctcaggggaggattccgtcttctctcatgagccgctgcccgaggagccctgcctgccccgacacccagcccagcttgccaatggcggactcaaacgccgctga

SEQ ID NO: 399 - DNA, 2469 bp, Homo sapiens
atgtggagctggaagtgcctcctcttctgggctgtgctggtcacagccacactctgcaccgctaggccgtccccgaccttgcctgaacaagcccagccctggggagcccctgtggaagtggagtccttcctggtccaccccggtgacctgctgcagcttcgctgtcggctgcgggacgatgtgcagagcatcaactggctgcgggacggggtgcagctggcggaaagcaaccgcacccgcatcacaggggaggaggtggaggtgcaggactccgtgcccgcagactccggcctctatgcttgcgtaaccagcagcccctcgggcagtgacaccacctacttctccgtcaatgtttcagatgctctcccctcctcggaggatgatgatgatgatgatgactcctcttcagaggagaaagaaacagataacaccaaaccaaaccgtatgcccgtagctccatattggacatccccagaaaagatggaaaagaaattgcatgcagtgccggctgccaagacagtgaagttcaaatgcccttccagtgggaccccaaaccccacactgcgctggttgaaaaatggcaaagaattcaaacctgaccacagaattggaggctacaaggtccgttatgccacctggagcatcataatggactctgtggtgccctctgacaagggcaactacacctgcattgtggagaatgagtacggcagcatcaaccacacataccagctggatgtcgtggagcggtcccctcaccggcccatcctgcaagcagggttgcccgccaacaaaacagtgtccctgggtagcaacgtggagttcatgtgtaaggtgtacagtgacccgcagccgcacatccagtggctaaagcacatcgaggtgaatgggagcaagattggcccagacaacctgccttatgtccagatcttgaagactgctggagttaataccaccgacaaagagatggaggtgcttcacttaagaaatgtctcctttgaggacgcaggggagtatacgtgcttggcgggtaactctatcggactctcccatcactctgcatggttgaccgttctggaagccctggaagagaggccggcagtgatgacctcgcccctgtacctggagatcatcatctattgcacaggggccttcctcatctcctgcatggtggggtcggtcatcgtctacaagatgaagagtggtaccaagaagagtgacttccacagccagatggctgtgcacaagctggccaagagcatccctctgcgcagacaggtaacagtgtctgctgactccagtgcatccatgaactctggggttcttctggttcggccatcacggctctcctccagtgggactcccatgctagcaggggtctctgagtatgagcttcccgaagaccctcgctgggagctgcctcgggacagactggtcttaggcaaacccctgggagagggctgctttgggcaggtggtgttggcagaggctatcgggctggacaaggacaaacccaaccgtgtgaccaaagtggctgtgaagatgttgaagtcggacgcaacagagaaagacttgtcagacctgatctcagaaatggagatgatgaagatgatcgggaagcataagaatatcatcaacctgctgggggcctgcacgcaggatggtcccttgtatgtcatcgtggagtatgcctccaagggcaacctgcgggagtacctgcaggcccggaggcccccagggctggaatactgctacaaccccagccacaacccagaggagcagctctcctccaaggacctggtgtcctgcgcctaccaggtggcccgaggcatggagtatctggcctccaagaagtgcatacaccgagacctggcagccaggaatgtcctggtgacagaggacaatgtgatgaagatagcagactttggcctcgcacgggacattcaccacatcgactactataaaaagacaaccaacggccgactgcctgtgaagtggatggcacccgaggcattatttgaccggatctacacccaccagagtgatgtgtggtctttcggggtgctcctgtgggagatcttcactctgggcggctccccataccccggtgtgcctgtggaggaacttttcaagctgctgaaggagggtcaccgcatggacaagcccagtaactgcaccaacgagctgtacatgatgatgcgggactgctggcatgcagtgccctcacagagacccaccttcaagcagctggtggaagacctggaccgcatcgtggccttgacctccaaccaggagtacctggacctgtccatgcccctggaccagtactcccccagctttcccgacacccggagctctacgtgctcctcaggggaggattccgtcttctctcatgagccgctgcccgaggagccctgcctgccccgacacccagcccagcttgccaatggcggactcaaacgccgctga

SEQ ID NO: 400 - DNA, 2463 bp, Homo sapiens
atgtggagctggaagtgcctcctcttctgggctgtgctggtcacagccacactctgcaccgctaggccgtccccgaccttgcctgaacaagcccagccctggggagcccctgtggaagtggagtccttcctggtccaccccggtgacctgctgcagcttcgctgtcggctgcgggacgatgtgcagagcatcaactggctgcgggacggggtgcagctggcggaaagcaaccgcacccgcatcacaggggaggaggtggaggtgcaggactccgtgcccgcagactccggcctctatgcttgcgtaaccagcagcccctcgggcagtgacaccacctacttctccgtcaatgtttcagatgctctcccctcctcggaggatgatgatgatgatgatgactcctcttcagaggagaaagaaacagataacaccaaaccaaaccgtatgcccgtagctccatattggacatccccagaaaagatggaaaagaaattgcatgcagtgccggctgccaagacagtgaagttcaaatgcccttccagtgggaccccaaaccccacactgcgctggttgaaaaatggcaaagaattcaaacctgaccacagaattggaggctacaaggtccgttatgccacctggagcatcataatggactctgtggtgccctctgacaagggcaactacacctgcattgtggagaatgagtacggcagcatcaaccacacataccagctggatgtcgtggagcggtcccctcaccggcccatcctgcaagcagggttgcccgccaacaaaacagtggccctgggtagcaacgtggagttcatgtgtaaggtgtacagtgacccgcagccgcacatccagtggctaaagcacatcgaggtgaatgggagcaagattggcccagacaacctgccttatgtccagatcttgaagactgctggagttaataccaccgacaaagagatggaggtgcttcacttaagaaatgtctcctttgaggacgcaggggagtatacgtgcttggcgggtaactctatcggactctcccatcactctgcatggttgaccgttctggaagccctggaagagaggccggcagtgatgacctcgcccctgtacctggagatcatcatctattgcacaggggccttcctcatctcctgcatggtggggtcggtcatcgtctacaagatgaagagtggtaccaagaagagtgacttccacagccagatggctgtgcacaagctggccaagagcatccctctgcgcagacaggtaacagtgtctgctgactccagtgcatccatgaactctggggttcttctggttcggccatcacggctctcctccagtgggactcccatgctagcaggggtctctgagtatgagcttcccgaagaccctcgctgggagctgcctcgggacagactggtcttaggcaaacccctgggagagggctgctttgggcaggtggtgttggcagaggctatcgggctggacaaggacaaacccaaccgtgtgaccaaagtggctgtgaagatgttgaagtcggacgcaacagagaaagacttgtcagacctgatctcagaaatggagatgatgaagatgatccataagaatatcatcaacctgctgggggcctgcacgcaggatggtcccttgtatgtcatcgtggagtatgcctccaagggcaacctgcgggagtacctgcaggcccggaggcccccagggctggaatactgctacaaccccagccacaacccagaggagcagctctcctccaaggacctggtgtcctgcgcctaccaggtggcccgaggcatggagtatctggcctccaagaagtgcatacaccgagacctggcagccaggaatgtcctggtgacagaggacaatgtgatgaagatagcagactttggcctcgcacgggacattcaccacatcgactactataaaaagacaaccaacggccgactgcctgtgaagtggatggcacccgaggcattatttgaccggatctacacccaccagagtgatgtgtggtctttcggggtgctcctgtgggagatcttcactctgggcggctccccataccccggtgtgcctgtggaggaacttttcaagctgctgaaggagggtcaccgcatggacaagcccagtaactgcaccaacgagctgtacatgatgatgcgggactgctggcatgcagtgccctcacagagacccaccttcaagcagctggtggaagacctggaccgcatcgtggccttgacctccaaccaggagtacctggacctgtccatgcccctggaccagtactcccccagctttcccgacacccggagctctacgtgctcctcaggggaggattccgtcttctctcatgagccgctgcccgaggagccctgcctgccccgacacccagcccagcttgccaatggcggactcaaacgccgctga

SEQ ID NO: 401 - DNA, 2118 bp, Homo sapiens
atggtcagctggggtcgtttcatctgcctggtcgtggtcaccatggcaaccttgtccctggcccggccctccttcagtttagttgaggataccacattagagccagaaggagcaccatactggaccaacacagaaaagatggaaaagcggctccatgctgtgcctgcggccaacactgtcaagtttcgctgcccagccggggggaacccaatgccaaccatgcggtggctgaaaaacgggaaggagtttaagcaggagcatcgcattggaggctacaaggtacgaaaccagcactggagcctcattatggaaagtgtggtcccatctgacaagggaaattatacctgtgtagtggagaatgaatacgggtccatcaatcacacgtaccacctggatgttgtggagcgatcgcctcaccggcccatcctccaagccggactgccggcaaatgcctccacagtggtcggaggagacgtagagtttgtctgcaaggtttacagtgatgcccagccccacatccagtggatcaagcacgtggaaaagaacggcagtaaatacgggcccgacgggctgccctacctcaaggttctcaagcactcggggataaatagttccaatgcagaagtgctggctctgttcaatgtgaccgaggcggatgctggggaatatatatgtaaggtctccaattatatagggcaggccaaccagtctgcctggctcactgtcctgccaaaacagcaagcgcctggaagagaaaaggagattacagcttccccagactacctggagatagccatttactgcataggggtcttcttaatcgcctgtatggtggtaacagtcatcctgtgccgaatgaagaacacgaccaagaagccagacttcagcagccagccggctgtgcacaagctgaccaaacgtatccccctgcggagacaggtttcggctgagtccagctcctccatgaactccaacaccccgctggtgaggataacaacacgcctctcttcaacggcagacacccccatgctggcaggggtctccgagtatgaacttccagaggacccaaaatgggagtttccaagagataagctgacactgggcaagcccctgggagaaggttgctttgggcaagtggtcatggcggaagcagtgggaattgacaaagacaagcccaaggaggcggtcaccgtggccgtgaagatgttgaaagatgatgccacagagaaagacctttctgatctggtgtcagagatggagatgatgaagatgattgggaaacacaagaatatcataaatcttcttggagcctgcacacaggatgggcctctctatgtcatagttgagtatgcctctaaaggcaacctccgagaatacctccgagcccggaggccacccgggatggagtactcctatgacattaaccgtgttcctgaggagcagatgaccttcaaggacttggtgtcatgcacctaccagctggccagacggatggagtacttggcttcccaaaaatgtattcatcgagatttagcagccagaaatgttttggtaacagaaaacaatgtgatgaaaacagcagactttggactcgccagagatatcaacaatatagactattacaaaaagaccaccaatgggcggcttccagtcaagtggatggctccagaagccctgtttgatagagtatacactcatcagagtgatgtctggtccttcggggtgttaatgtgggagatcttcactttagggggctcgccctacccagggattcccgtggaggaactttttaagctgctgaaggaaggacacagaatggataagccagccaactgcaccaacgaactgtacatgatgatgagggactgttggcatgcagtgccctcccagagaccaacgttcaagcagttggtagaagacttggatcgaattctcactctcacaaccaatgaggaatacttggacctcagccaacctctcgaacagtattcacctagttaccctgacacaagaagttcttgttcttcaggagatgattctgttttttctccagaccccatgccttacgaaccatgccttcctcagtatccacacataaacggcagtgttaaaacatga

SEQ ID NO: 402 - DNA, 2409 bp, Homo sapiens
atgcggctgctgctggccctgttgggggtcctgctgagtgtgcctgggcctccagtcttgtccctggaggcctctgaggaagtggagcttgagccctgcctggctcccagcctggagcagcaagagcaggagctgacagtagcccttgggcagcctgtgcgtctgtgctgtgggcgggctgagcgtggtggccactggtacaaggagggcagtcgcctggcacctgctggccgtgtacggggctggaggggccgcctagagattgccagcttcctacctgaggatgctggccgctacctctgcctggcacgaggctccatgatcgtcctgcagaatctcaccttgattacaggtgactccttgacctccagcaacgatgatgaggaccccaagtcccatagggacctctcgaataggcacagttacccccagcaagcaccctactggacacacccccagcgcatggagaagaaactgcatgcagtacctgcggggaacaccgtcaagttccgctgtccagctgcaggcaaccccacgcccaccatccgctggcttaaggatggacaggcctttcatggggagaaccgcattggaggcattcggctgcgccatcagcactggagtctcgtgatggagagcgtggtgccctcggaccgcggcacatacacctgcctggtagagaacgctgtgggcagcatccgctataactacctgctagatgtgctggagcggtccccgcaccggcccatcctgcaggccgggctcccggccaacaccacagccgtggtgggcagcgacgtggagctgctgtgcaaggtgtacagcgatgcccagccccacatccagtggctgaagcacatcgtcatcaacggcagcagcttcggagccgacggtttcccctatgtgcaagtcctaaagactgcagacatcaatagctcagaggtggaggtcctgtacctgcggaacgtgtcagccgaggacgcaggcgagtacacctgcctcgcaggcaattccatcggcctctcctaccagtctgcctggctcacggtgctgccagaggaggaccccacatggaccgcagcagcgcccgaggccaggtgtacggacatcatcctgtacgcgtcgggctccctggccttggctgtgctcctgctgctggccgggctgtatcgagggcaggcgctccacggccggcacccccgcccgcccgccactgtgcagaagctctcccgcttccctctggcccgacagttctccctggagtcaggctcttccggcaagtcaagctcatccctggtacgaggcgtgcgtctctcctccagcggccccgccttgctcgccggcctcgtgagtctagatctacctctcgacccactatgggagttcccccgggacaggctggtgcttgggaagcccctaggcgagggctgctttggccaggtagtacgtgcagaggcctttggcatggaccctgcccggcctgaccaagccagcactgtggccgtcaagatgctcaaagacaacgcctctgacaaggacctggccgacctggtctcggagatggaggtgatgaagctgatcggccgacacaagaacatcatcaacctgcttggtgtctgcacccaggaagggcccctgtacgtgatcgtggagtgcgccgccaagggaaacctgcgggagttcctgcgggcccggcgccccccaggccccgacctcagccccgacggtcctcggagcagtgaggggccgctctccttcccagtcctggtctcctgcgcctaccaggtggcccgaggcatgcagtatctggagtcccggaagtgtatccaccgggacctggctgcccgcaatgtgctggtgactgaggacaatgtgatgaagattgctgactttgggctggcccgcggcgtccaccacattgactactataagaaaaccagcaacggccgcctgcctgtgaagtggatggcgcccgaggccttgtttgaccgggtgtacacacaccagagtgacgtgtggtcttttgggatcctgctatgggagatcttcaccctcgggggctccccgtatcctggcatcccggtggaggagctgttctcgctgctgcgggagggacatcggatggaccgacccccacactgccccccagagctgtacgggctgatgcgtgagtgctggcacgcagcgccctcccagaggcctaccttcaagcagctggtggaggcgctggacaaggtcctgctggccgtctctgaggagtacctcgacctccgcctgaccttcggaccctattccccctctggtggggacgccagcagcacctgctcctccagcgattctgtcttcagccacgaccccctgccattgggatccagctccttccccttcgggtctggggtgcagacatga

SEQ ID NO: 403 - DNA, 2982 bp, Homo sapiens
atgccggcgttggcgcgcgacggcggccagctgccgctgctcgttgttttttctgcaatgatatttgggactattacaaatcaagatctgcctgtgatcaagtgtgttttaatcaatcataagaacaatgattcatcagtggggaagtcatcatcatatcccatggtatcagaatccccggaagacctcgggtgtgcgttgagaccccagagctcagggacagtgtacgaacgtgccgctgtggaagtggatgtatctgcttccatcacactgcaagtgctggtcgatgccccagggaacatttcctgtctctgggtctttaagcacagctccctgaattgccagccacattttgatttacaaaacagaggagttgtttccatggtcattttgaaaatgacagaaacccaagctggagaatacctactttttattcagagtgaagctaccaattacacaatattgtttacagtgagtataagaaataccctgctttacacattaagaagaccttactttagaaaaatggaaaaccaggacgccctggtctgcatatctgagagcgttccagagccgatcatggaatgggtgctttgcgattcacagggggaaagctgtaaagaagaaagtccagctgttgttaaaaaggaggaaaaagtgcttcatgaattatttgggatggacataaggtgctgtgccagaaatgaactgggcagggaatgcaccaggctgttcacaatagatctaaatcaaactcctcagaccacattgccacaattatttcttaaagtaggggaacccttatggataaggtgcaaagctgttcatgtgaaccatggattcgggctcacctgggaattagaaaacaaagcactcgaggagggcaactactttgagatgagtacctattcaacaaacagaactatgatacggattctgtttgcttttgtatcatcagtggcaagaaacgacaccggatactacacttgttcctcttcaaagcatcccagtcaatcagctttggttaccatcgtagaaaagggatttataaatgctaccaattcaagtgaagattatgaaattgaccaatatgaagagttttgtttttctgtcaggtttaaagcctacccacaaatcagatgtacgtggaccttctctcgaaaatcatttccttgtgagcaaaagggtcttgataacggatacagcatatccaagttttgcaatcataagcaccagccaggagaatatatattccatgcagaaaatgatgatgcccaatttaccaaaatgttcacgctgaatataagaaggaaacctcaagtgctcgcagaagcatcggcaagtcaggcgtcctgtttctcggatggatacccattaccatcttggacctggaagaagtgttcagacaagtctcccaactgcacagaagagatcacagaaggagtctggaatagaaaggctaacagaaaagtgtttggacagtgggtgtcgagcagtactctaaacatgagtgaagccataaaagggttcctggtcaagtgctgtgcatacaattcccttggcacatcttgtgagacgatccttttaaactctccaggccccttccctttcatccaagacaacatctcattctatgcaacaattggtgtttgtctcctcttcattgtcgttttaaccctgctaatttgtcacaagtacaaaaagcaatttaggtatgaaagccagctacagatggtacaggtgaccggctcctcagataatgagtacttctacgttgatttcagagaatatgaatatgatctcaaatgggagtttccaagagaaaatttagagtttgggaaggtactaggatcaggtgcttttggaaaagtgatgaacgcaacagcttatggaattagcaaaacaggagtctcaatccaggttgccgtcaaaatgctgaaagaaaaagcagacagctctgaaagagaggcactcatgtcagaactcaagatgatgacccagctgggaagccacgagaatattgtgaacctgctgggggcgtgcacactgtcaggaccaatttacttgatttttgaatactgttgctatggtgatcttctcaactatctaagaagtaaaagagaaaaatttcacaggacttggacagagattttcaaggaacacaatttcagtttttaccccactttccaatcacatccaaattccagcatgcctggttcaagagaagttcagatacacccggactcggatcaaatctcagggcttcatgggaattcatttcactctgaagatgaaattgaatatgaaaaccaaaaaaggctggaagaagaggaggacttgaatgtgcttacatttgaagatcttctttgctttgcatatcaagttgccaaaggaatggaatttctggaatttaagtcgtgtgttcacagagacctggccgccaggaacgtgcttgtcacccacgggaaagtggtgaagatatgtgactttggattggctcgagatatcatgagtgattccaactatgttgtcaggggcaatgcccgtctgcctgtaaaatggatggcccccgaaagcctgtttgaaggcatctacaccattaagagtgatgtctggtcatatggaatattactgtgggaaatcttctcacttggtgtgaatccttaccctggcattccggttgatgctaacttctacaaactgattcaaaatggatttaaaatggatcagccattttatgctacagaagaaatatacattataatgcaatcctgctgggcttttgactcaaggaaacggccatccttccctaatttgacttcgtttttaggatgtcagctggcagatgcagaagaagcgatgtatcagaatgtggatggccgtgtttcggaatgtcctcacacctaccaaaacaggcgacctttcagcagagagatggatttggggctactctctccgcaggctcaggtcgaagattcgtag

SEQ ID NO: 404 - DNA, 2982 bp, Homo sapiens
atgccggcgttggcgcgcgacggcggccagctgccgctgctcgttgttttttctgcaatgatatttgggactattacaaatcaagatctgcctgtgatcaagtgtgttttaatcaatcataagaacaatgattcatcagtggggaagtcatcatcatatcccatggtatcagaatccccggaagacctcgggtgtgcgttgagaccccagagctcagggacagtgtacgaacgtgccgctgtggaagtggatgtatctgcttccatcacactgcaagtgctggtcgatgccccagggaacatttcctgtctctgggtctttaagcacagctccctgaattgccagccacattttgatttacaaaacagaggagttgtttccatggtcattttgaaaatgacagaaacccaagctggagaatacctactttttattcagagtgaagctaccaattacacaatattgtttacagtgagtataagaaataccctgctttacacattaagaagaccttactttagaaaaatggaaaaccaggacgccctggtctgcatatctgagagcgttccagagccgatcgtggaatgggtgctttgcgattcacagggggaaagctgtaaagaagaaagtccagctgttgttaaaaaggaggaaaaagtgcttcatgaattatttgggatggacataaggtgctgtgccagaaatgaactgggcagggaatgcaccaggctgttcacaatagatctaaatcaaactcctcagaccacattgccacaattatttcttaaagtaggggaacccttatggataaggtgcaaagctgttcatgtgaaccatggattcgggctcacctgggaattagaaaacaaagcactcgaggagggcaactactttgagatgagtacctattcaacaaacagaactatgatacggattctgtttgcttttgtatcatcagtggcaagaaacgacaccggatactacacttgttcctcttcaaagcatcccagtcaatcagctttggttaccatcgtagaaaagggatttataaatgctaccaattcaagtgaagtttatgaaattgaccaatatgaagagttttgtttttctgtcaggtttaaagcctacccacaaatcagatgtacgtggaccttctctcgaaaatcatttccttgtgagcaaaagggtcttgataacggatacagcatatccaagttttgcaatcataagcaccagccaggagaatatatattccatgcagaaaatgatgatgcccaatttaccaaaatgttcacgctgaatataagaaggaaacctcaagtgctcgcagaagcatcggcaagtcaggcgtcctgtttctcggatggatacccattaccatcttggacctggaagaagtgttcagacaagtctcccaactgcacagaagagatcacagaaggagtctggaatagaaaggctaacagaaaagtgtttggacagtgggtgtcgagcagtactctaaacatgagtgaagccataaaagggttcctggtcaagtgctgtgcatacaattcccttggcacatcttgtgagacgatccttttaaactctccaggccccttccctttcatccaagacaacatctcattctatgcaacaattggtgtttgtctcctcttcattgtcgttttaaccctgctaatttgtcacaagtacaaaaagcaatttaggtatgaaagccagctacagatggtacaggtgaccggctcctcagataatgagtacttctacgttgatttcagagaatatgaatatgatctcaaatgggagtttccaagagaaaatttagagtttgggaaggtactaggatcaggtgcttttggaaaagtgatgaacgcaacagcttatggaattagcaaaacaggagtctcaatccaggttgccgtcaaaatgctgaaagaaaaagcagacagctctgaaagagaggcactcatgtcagaactcaagatgatgacccagctgggaagccacgagaatattgtgaacctgctgggggcgtgcacactgtcaggaccaatttacttgatttttgaatactgttgctatggtgatcttctcaactatctaagaagtaaaagagaaaaatttcacaggacttggacagagattttcaaggaacacaatttcagtttttaccccactttccaatcacatccaaattccagcatgcctggttcaagagaagttcagatacacccggactcggatcaaatctcagggcttcatgggaattcatttcactctgaagatgaaattgaatatgaaaaccaaaaaaggctggaagaagaggaggacttgaatgtgcttacatttgaagatcttctttgctttgcatatcaagttgccaaaggaatggaatttctggaatttaagtcgtgtgttcacagagacctggccgccaggaacgtgcttgtcacccacgggaaagtggtgaagatatgtgactttggattggctcgagatatcatgagtgattccaactatgttgtcaggggcaatgcccgtctgcctgtaaaatggatggcccccgaaagcctgtttgaaggcatctacaccattaagagtgatgtctggtcatatggaatattactgtgggaaatcttctcacttggtgtgaatccttaccctggcattccggttgatgctaacttctacaaactgattcaaaatggatttaaaatggatcagccattttatgctacagaagaaatatacattataatgcaatcctgctgggcttttgactcaaggaaacggccatccttccctaatttgacttcgtttttaggatgtcagctggcagatgcagaagaagcgatgtatcagaatgtggatggccgtgtttcggaatgtcctcacacctaccaaaacaggcgacctttcagcagagagatggatttggggctactctctccgcaggctcaggtcgaagattcgtag

SEQ ID NO: 405 - DNA, 2982 bp, Homo sapiens
atgccggcgttggcgcgcgacggcggccagctgccgctgctcgttgttttttctgcaatgatatttgggactattacaaatcaagatctgcctgtgatcaagtgtgttttaatcaatcataagaacaatgattcatcagtggggaagtcatcatcatatcccatggtatcagaatccccggaagacctcgggtgtgcgttgagaccccagagctcagggacagtgtacgaacgtgccgctgtggaagtggatgtatctgcttccatcacactgcaagtgctggtcgatgccccagggaacatttcctgtctctgggtctttaagcacagctccctgaattgccagccacattttgatttacaaaacagaggagttgtttccatggtcattttgaaaatgacagaaacccaagctggagaatacctactttttattcagagtgaagctaccaattacacaatattgtttacagtgagtataagaaataccctgctttacacattaagaagaccttactttagaaaaatggaaaaccaggacgccctggtctgcatatctgagagcgttccagagccgatcgtggaatgggtgctttgcgattcacagggggaaagctgtaaagaagaaagtccagctgttgttaaaaaggaggaaaaagtgcttcatgaattatttgggatggacataaggtgctgtgccagaaatgaactgggcagggaatgcaccaggctgttcacaatagatctaaatcaaactcctcagaccacattgccacaattatttcttaaagtaggggaacccttatggataaggtgcaaagctgttcatgtgaaccatggattcgggctcacctgggaattagaaaacaaagcactcgaggagggcaactactttgagatgagtacctattcaacaaacagaactatgatacggattctgtttgcttttgtatcatcagtggcaagaaacgacaccggatactacacttgttcctcttcaaagcatcccagtcaatcagctttggttaccatcgtagaaaagggatttataaatgctaccaattcaagtgaagattatgaaattgaccaatatgaagagttttgtttttctgtcaggtttaaagcctacccacaaatcagatgtacgtggaccttctctcgaaaatcatttccttgtgagcaaaagggtcttgataacggatacagcatatccaagttttgcaatcataagcaccagccaggagaatatatattccatgcagaaaatgatgatgcccaatttaccaaaatgttcacgctgaatataagaaggaaacctcaagtgctcgcagaagcatcggcaagtcaggcgtcctgtttctcggatggatacccattaccatcttggacctggaagaagtgttcagacaagtctcccaactgcacagaagagatcacagaaggagtctggaatagaaaggctaacagaaaagtgtttggacagtgggtgtcgagcagtactctaaacatgagtgaagccataaaagggttcctggtcaagtgctgtgcatacaattcccttggcacatcttgtgagacgatccttttaaactctccaggccccttccctttcatccaagacaacatctcattctatgcaacaattggtgtttgtctcctcttcattgtcattttaaccctgctaatttgtcacaagtacaaaaagcaatttaggtatgaaagccagctacagatggtacaggtgaccggctcctcagataatgagtacttctacgttgatttcagagaatatgaatatgatctcaaatgggagtttccaagagaaaatttagagtttgggaaggtactaggatcaggtgcttttggaaaagtgatgaacgcaacagcttatggaattagcaaaacaggagtctcaatccaggttgccgtcaaaatgctgaaagaaaaagcagacagctctgaaagagaggcactcatgtcagaactcaagatgatgacccagctgggaagccacgagaatattgtgaacctgctgggggcgtgcacactgtcaggaccaatttacttgatttttgaatactgttgctatggtgatcttctcaactatctaagaagtaaaagagaaaaatttcacaggacttggacagagattttcaaggaacacaatttcagtttttaccccactttccaatcacatccaaattccagcatgcctggttcaagagaagttcagatacacccggactcggatcaaatctcagggcttcatgggaattcatttcactctgaagatgaaattgaatatgaaaaccaaaaaaggctggaagaagaggaggacttgaatgtgcttacatttgaagatcttctttgctttgcatatcaagttgccaaaggaatggaatttctggaatttaagtcgtgtgttcacagagacctggccgccaggaacgtgcttgtcacccacgggaaagtggtgaagatatgtgactttggattggctcgagatatcatgagtgattccaactatgttgtcaggggcaatgcccgtctgcctgtaaaatggatggcccccgaaagcctgtttgaaggcatctacaccattaagagtgatgtctggtcatatggaatattactgtgggaaatcttctcacttggtgtgaatccttaccctggcattccggttgatgctaacttctacaaactgattcaaaatggatttaaaatggatcagccattttatgctacagaagaaatatacattataatgcaatcctgctgggcttttgactcaaggaaacggccatccttccctaatttgacttcgtttttaggatgtcagctggcagatgcagaagaagcgatgtatcagaatgtggatggccgtgtttcggaatgtcctcacacctaccaaaacaggcgacctttcagcagagagatggatttggggctactctctccgcaggctcaggtcgaagattcgtag

SEQ ID NO: 406 - DNA, 2982 bp, Homo sapiens
atgccggcgttggcgcgcgacggcggccagctgccgctgctcgttgttttttctgcaatgatatttgggactattacaaatcaagatctgcctgtgatcaagtgtgttttaatcaatcataagaacaatgattcatcagtggggaagtcatcatcatatcccatggtatcagaatccccggaagacctcgggtgtgcgttgagaccccagagctcagggacagtgtacgaacgtgccgctgtggaagtggatgtatctgcttccatcacactgcaagtgctggtcgatgccccagggaacatttcctgtctctgggtctttaagcacagctccctgaattgccagccacattttgatttacaaaacagaggagttgtttccatggtcattttgaaaatgacagaaacccaagctggagaatacctactttttattcagagtgaagctaccaattacacaatattgtttacagtgagtataagaaataccctgctttacacattaagaagaccttactttagaaaaatggaaaaccaggacgccctggtctgcatatctgagagcgttccagagccgatcgtggaatgggtgctttgcgattcacagggggaaagctgtaaagaagaaagtccagctgttgttaaaaaggaggaaaaagtgcttcatgaattatttgggatggacataaggtgctgtgccagaaatgaactgggcagggaatgcaccaggctgttcacaatagatctaaatcaaactcctcagaccacattgccacaattatttcttaaagtaggggaacccttatggataaggtgcaaagctgttcatgtgaaccatggattcgggctcacctgggaattagaaaacaaagcactcgaggagggcaactactttgagatgagtacctattcaacaaacagaactatgatacggattctgtttgcttttgtatcatcagtggcaagaaacgacaccggatactacacttgttcctcttcaaagcatcccagtcaatcagctttggttaccatcgtagaaaagggatttataaatgctaccaattcaagtgaagattatgaaattgaccaatatgaagagttttgtttttctgtcaggtttaaagcctacccacaaatcagatgtacgtggaccttctctcgaaaatcatttccttgtgagcaaaagggtcttgataacggatacagcatatccaagttttgcaatcataagcaccagccaggagaatatatattccatgcagaaaatgatgatgcccaatttaccaaaatgttcacgctgaatataagaaggaaacctcaagtgctcgcagaagcatcggcaagtcaggcgtcctgtttctcggatggatacccattaccatcttggacctggaagaagtgttcagacaagtctcccaactgcacagaagagatcacagaaggagtctggaatagaaaggctaacagaaaagtgtttggacagtgggtgtcgagcagtactctaaacatgagtgaagccataaaagggttcctggtcaagtgctgtgcatacaattcccttggcacatcttgtgagacgatccttttaaactctccaggccccttccctttcatccaagacaacatctcattctatgcaacaattggtgtttgtctcctcttcattgtcgttttaaccctgctaatttgtcacaagtacaaaaagcaatttaggtatgaaagccagctacagatggtacaggtgaccggctcctcagataatgagtacttctacgttgatttcagagaatatgaatatgatctcaaatgggagtttccaagagaaaatttagagtttgggaaggtactaggatcaggtgcttttggaaaagtgatgaacgcaacagcttatggaattagcaaaacaggagtctcaatccaggttgccgtcaaaatgctgaaagaaaaagcagacagctctgaaagagaggcactcatgtcagaactcaagatgatgacccagctgggaagccacgagaatattgtgaacctgctgggggcgtgcacactgtcaggaccaatttacttgatttttgaatactgttgctatggtgatcttctcaactatctaagaagtaaaagagaaaaatttcacaggacttggacagagattttcaaggaacacaatttcagtttttaccccactttccaatcacatccaaattccagcatgcctggttcaagagaagttcagatacacccggactcggatcaaatctcagggcttcatgagaattcatttcactctgaagatgaaattgaatatgaaaaccaaaaaaggctggaagaagaggaggacttgaatgtgcttacatttgaagatcttctttgctttgcatatcaagttgccaaaggaatggaatttctggaatttaagtcgtgtgttcacagagacctggccgccaggaacgtgcttgtcacccacgggaaagtggtgaagatatgtgactttggattggctcgagatatcatgagtgattccaactatgttgtcaggggcaatgcccgtctgcctgtaaaatggatggcccccgaaagcctgtttgaaggcatctacaccattaagagtgatgtctggtcatatggaatattactgtgggaaatcttctcacttggtgtgaatccttaccctggcattccggttgatgctaacttctacaaactgattcaaaatggatttaaaatggatcagccattttatgctacagaagaaatatacattataatgcaatcctgctgggcttttgactcaaggaaacggccatccttccctaatttgacttcgtttttaggatgtcagctggcagatgcagaagaagcgatgtatcagaatgtggatggccgtgtttcggaatgtcctcacacctaccaaaacaggcgacctttcagcagagagatggatttggggctactctctccgcaggctcaggtcgaagattcgtag

SEQ ID NO: 407 - DNA, 2982 bp, Homo sapiens
atgccggcgttggcgcgcgacggcggccagctgccgctgctcgttgttttttctgcaatgatatttgggactattacaaatcaagatctgcctgtgatcaagtgtgttttaatcaatcataagaacaatgattcatcagtggggaagtcatcatcatatcccatggtatcagaatccccggaagacctcgggtgtgcgttgagaccccagagctcagggacagtgtacgaacgtgccgctgtggaagtggatgtatctgcttccatcacactgcaagtgctggtcgatgccccagggaacatttcctgtctctgggtctttaagcacagctccctgaattgccagccacattttgatttacaaaacagaggagttgtttccatggtcattttgaaaatgacagaaacccaagctggagaatacctactttttattcagagtgaagctaccaattacacaatattgtttacagtgagtataagaaataccctgctttacacattaagaagaccttactttagaaaaatggaaaaccaggacgccctggtctgcatatctgagagcgttccagagccgatcgtggaatgggtgctttgcgattcacagggggaaagctgtaaagaagaaagtccagctgttgttaaaaaggaggaaaaagtgcttcatgaattatttgggatggacataaggtgctgtgccagaaatgaactgggcagggaatgcaccaggctgttcacaatagatctaaatcaaactcctcagaccacattgccacaattatttcttaaagtaggggaacccttatggataaggtgcaaagctgttcatgtgaaccatggattcgggctcacctgggaattagaaaacaaagcactcgaggagggcaactactttgagatgagtacctattcaacaaacagaactatgatacggattctgtttgcttttgtatcatcagtggcaagaaacgacaccggatactacacttgttcctcttcaaagcatcccagtcaatcagctttggttaccatcgtagaaaagggatttataaatgctaccaattcaagtgaagattatgaaattgaccaatatgaagagttttgtttttctgtcaggtttaaagcctacccacaaatcagatgtacgtggaccttctctcgaaaatcatttccttgtgagcaaaagggtcttgataacggatacagcatatccaagttttgcaatcataagcaccagccaggagaatatatattccatgcagaaaatgatgatgcccaatttaccaaaatgttcacgctgaatataagaaggaaacctcaagtgctcgcagaagcatcggcaagtcaggcgtcctgtttctcggatggatacccattaccatcttggacctggaagaagtgttcagacaagtctcccaactgcacagaagagatcacagaaggagtctggaatagaaaggctaacagaaaagtgtttggacagtgggtgtcgagcagtactctaaacatgagtgaagccataaaagggttcctggtcaagtgctgtgcatacaattcccttggcacatcttgtgagacgatccttttaaactctccaggccccttccctttcatccaagacaacatctcattctatgcaacaattggtgtttgtctcctcttcattgtcgttttaaccctgctaatttgtcacaagtacaaaaagcaatttaggtatgaaagccagctacagatggtacaggtgaccggctcctcagataatgagtacttctacgttgatttcagagaatatgaatatgatctcaaatgggagtttccaagagaaaatttagagtttgggaaggtactaggatcaggtgcttttggaaaagtgatgaacgcaacagcttatggaattagcaaaacaggagtctcaatccaggttgccgtcaaaatgctgaaagaaaaagcagacagctctgaaagagaggcactcatgtcagaactcaagatgatgacccagctgggaagccacgagaatattgtgaacctgctgggggcgtgcacactgtcaggaccaatttacttgatttttgaatactgttgctatggtgatcttctcaactatctaagaagtaaaagagaaaaatttcacaggacttggacagagattttcaaggaacacaatttcagtttttaccccactttccaatcacatccaaattccagcatgcctggttcaagagaagttcagatacacccggactcggatcaaatctcagggcttcatgggaattcatttcactctgaagatgaaattgaatatgaaaaccaaaaaaggctggaagaagaggaggacttgaatgtgcttacatttgaagatcttctttgctttgcatatcaagttgccaaaggaatggaatttctggaatttaagtcgtgtgttcacagagacctggccgccaggaacgtgcttgtcacccacgggaaagtggtgaagatatgtgactttggattggctcgagatatcatgagtgattccaactatgttgtcaggggcaatgcccatctgcctgtaaaatggatggcccccgaaagcctgtttgaaggcatctacaccattaagagtgatgtctggtcatatggaatattactgtgggaaatcttctcacttggtgtgaatccttaccctggcattccggttgatgctaacttctacaaactgattcaaaatggatttaaaatggatcagccattttatgctacagaagaaatatacattataatgcaatcctgctgggcttttgactcaaggaaacggccatccttccctaatttgacttcgtttttaggatgtcagctggcagatgcagaagaagcgatgtatcagaatgtggatggccgtgtttcggaatgtcctcacacctaccaaaacaggcgacctttcagcagagagatggatttggggctactctctccgcaggctcaggtcgaagattcgtag

SEQ ID NO: 408 - DNA, 1518 bp, Homo sapiens
atgagcaacatctgtcagaggctctgggagtacctagaaccctatctcccctgtttgtccacggaggcagacaagtcaaccgtgattgaaaatccaggggccctttgctctccccagtcacagaggcatggccactactttgtggctttgtttgattaccaggctcggactgctgaggacttgagcttccaagcaggtgacaaacttcaagttctggacactttgcatgagggctggtggtttgccagacacttggagaaaagacgagatggctccagtcagcaactacaaggctatattccttctaactacgtggctgaggacagaagcctacaggcagagccgtggttctttggagcaatcggaagatcagatgcagagaaacaactattatattcagaaaacaagaccggttcctttctaatcagagaaagtgaaagccaaaaaggagaattctctctttcagttttagatggagcagttgtaaaacactacagaattaaaagactggatgaagggggattttttctcacgcgaagaagaatcttttcaacactgaacgaatttgtgagccactacaccaagacaagtgacggcctgtgtgtcaagctggggaaaccatgcttaaagatccaggtcccagctccatttgatttgtcgtataaaaccgtggaccaatgggagatagaccgcaactccatacagcttctgaagcgattgggatctggtcagtttggcgaagtatgggaaggtctgtggaacaataccactccagtagcagtgaaaacattaaaaccaggttcaatggatccaaatgacttcctgagggaggcacagataatgaagaacctaagacatccaaagcttatccagctttatgctgtttgcactttagaagatccaatttatattattacagagttgatgagacatggaagtctgcaagaatatctccaaaatgacactggatcaaaaatccatctgactcaacaggtagacatggcggcacaggttgcctctggaatggcctatctggagtctcggaactacattcacagagatctggctgccagaaatgtcctcgttggtgaacataatatctacaaagtagcagattttggacttgccagagtttttaaggtagataatgaagacatctatgaatctagacacgaaataaagctgccggtgaagtggactgcgcccgaagccattcgtagtaataaattcagcattaagtccgatgtatggtcatttggaatccttctttatgaaatcattacttatggcaaaatgccttacagtggtatgacaggtgcccaggtaatccagatgttggctcaaaactatagacttccgcaaccatccaactgtccacagcaattttacaacatcatgttggagtgctggaatgcagagcctaaggaacgacctacatttgagacactgcgttggaaacttgaagactattttgaaacagactcttcatattcagatgcaaataacttcataagatga

SEQ ID NO: 409 - DNA, 1518 bp, Homo sapiens
atgagcaacatctgtcagaggctctgggagtacctagaaccctatctcccctgtttgtccacggaggcagacaagtcaaccgtgattgaaaatccaggggccctttgctctccccagtcacagaggcatggccactactttgtggctttgtttgattaccaggctcggactgctgaggacttgagcttccgagcaggtgacaaacttcaagttctggacactttgcatgagggctggtggtttgccagacacttggagaaaagacgagatggctccagtcagcaactacaaggctatattccttctaactacgtggctgaggacagaagcctacaggcagagccgtggttctttgcagcaatcggaagatcagatgcagagaaacaactattatattcagaaaacaagaccggttcctttctaatcagagaaagtgaaagccaaaaaggagaattctctctttcagttttagatggagcagttgtaaaacactacagaattaaaagactggatgaagggggattttttctcacgcgaagaagaatcttttcaacactgaacgaatttgtgagccactacaccaagacaagtgacggcctgtgtgtcaagctggggaaaccatgcttaaagatccaggtcccagctccatttgatttgtcgtataaaaccgtggaccaatgggagatagaccgcaactccatacagcttctgaagcgattgggatctggtcagtttggcgaagtatgggaaggtctgtggaacaataccactccagtagcagtgaaaacattaaaaccaggttcaatggatccaaatgacttcctgagggaggcacagataatgaagaacctaagacatccaaagcttatccagctttatgctgtttgcactttagaagatccaatttatattattacagagttgatgagacatggaagtctgcaagaatatctccaaaatgacactggatcaaaaatccatctgactcaacaggtagacatggcggcacaggttgcctctggaatggcctatctggagtctcggaactacattcacagagatctggctgccagaaatgtcctcgttggtgaacataatatctacaaagtagcagattttggacttgccagagtttttaaggtagataatgaagacatctatgaatctagacacgaaataaagctgccggtgaagtggactgcgcccgaagccattcgtagtaataaattcagcattaagtccgatgtatggtcatttggaatccttctttatgaaatcattacttatggcaaaatgccttacagtggtatgacaggtgcccaggtaatccagatgttggctcaaaactatagacttccgcaaccatccaactgtccacagcaattttacaacatcatgttggagtgctggaatgcagagcctaaggaacgacctacatttgagacactgcgttggaaacttgaagactattttgaaacagactcttcatattcagatgcaaataacttcataagatga

SEQ ID NO: 410 - DNA, 1518 bp, Homo sapiens
atgagcaacatctgtcagaggctctgggagtacctagaaccctatctcccctgtttgtccacggaggcagacaagtcaaccgtgattgaaaatccaggggccctttgctctccccagtcacagaggcatggccactactttgtggctttgtttgattaccaggctcggactgctgaggacttgagcttccgagcaggtgacaaacttcaagttctggacactttgcatgagggctggtggtttgccagacacttggagaaaagacgagatggctccagtcagcaactacaaggctatattccttctaactacgtggctgaggacagaagcctacaggcagagccgtggttctttggagcaatcggaagatcagatgcagagaaacaactattatattcagaaaacaagaccggttcctttctaatcagagaaagtgaaagccaaaaaggagaattctctctttcagttttagatggagcagttgtaaaacactacagaattaaaagactggatgaagggggattttttctcacgcgaagaagaatcttttcaacactgaacgaatttgtgagccactacaccaagacaagtgacggcctgtgtgtcaagctggggaaaccatgcttaaagatccaggtcccagctccatttgatttgtcgtataaaaccgtggaccaatgggagatagaccgcaactccatacagcttctgaagcgattgggatctggtcagtttggcgaagtatgggaaggtctgtggaacaataccactccagtagcagtgaaaacattaaaaccaggttcaatggatccaaatgacttcctgagggaggcacagataatgaagaacctaagacatccaaagcttatccagctttatgctgtttgcactttagaagatccaatttatattattacagagttgatgagacatggaagtctgcaagaatatctccaaaatgacactggatcaaaaatccatctgactcaacaggtagacatggcggcacaggttgcctctggaatggcctatctggagtctcggaactacattcacagagatctggctgccagaaatgtcctcgttggtgaacataatatctacaaagtagcagattttggacttgccagagtttttaaggtagataatgaagacatctatgaatctagacacgaaataaagctgccggtgaagtggactgcgcccgaagccattcatagtaataaattcagcattaagtccgatgtatggtcatttggaatccttctttatgaaatcattacttatggcaaaatgccttacagtggtatgacaggtgcccaggtaatccagatgttggctcaaaactatagacttccgcaaccatccaactgtccacagcaattttacaacatcatgttggagtgctggaatgcagagcctaaggaacgacctacatttgagacactgcgttggaaacttgaagactattttgaaacagactcttcatattcagatgcaaataacttcataagatga

SEQ ID NO: 411 - DNA, 1614 bp, Homo sapiens
atgggctgtgtgcaatgtaaggataaagaagcaacaaaactgacggaggagagggacggcagcctgaaccagagctctgggtaccgctatggcacagaccccacccctcagcactaccccagcttcggtgtgacctccatccccaactacaacaacttccacgcagccgggggccaaggactcaccgtctttggaggtgtgaactcttcgtctcatacggggaccttgcgtacgagaggaggaacaggagtgacactctttgtggccctttatgactatgaagcacggacagaagatgacctgagttttcacaaaggagaaaaatttcaaatattgaacagctcggaaggagattggtgggaagcccgctccttgacaactggagagacaggttacattcccagcaattatgtggctccagttgactctatccaggcagaagagtggtactttggaaaacttggccgaaaagatgctgagcgacagctattgtcctttggaaacccaagaggtacctttcttatccgcgagagtgaaaccaccaaaggtgcctattcactttctatccgtgattgggatgatatgaaaggagaccatgtcaaacattataaaattcgcaaacttgacaatggtggatactacattaccacccgggcccagtttgaaacacttcagcagcttgtacaacattactcagagagagctgcaggtctctgctgccgcctagtagttccctgtcacaaagggatgccaaggcttaccgatctgtctgtcaaaaccaaagatgtctgggaaatccctcgagaatccctgcagttgatcaagagactgggaaatgggcagtttggggaagtatggatgggtacctggaatggaaacacaaaagtagccataaagactcttaaaccaggcacaatgtcccccgaatcattccttgaggaagcgcagatcatgaagaagctgaagcacgacaagctggtccagctctatgcagtggtgtctgaggagcccatctacatcgtcaccgagtatatgaacaaaggaagtttactggatttcttaaaagatggagaaggaagagctctgaaattaccaaatcttgtggacatggcagcacaggtggctgcaggaatggcttacatcgagcgcatgaattatatccatagagatctgcgatcagcaaacattctagtggggaatggactcatatgcaagattgctgacttcggattggcccgattgatagaagacaatgagtacacagcaagacaaggtgcaaagttccccatcaagtggacggcccccgaggcagccctgtacgggaggttcacaatcaagtctgacgtgtggtcttttggaatcttactcacagagctggtcaccaaaggaagagtgccatacccaggcatgaacaaccgggaggtgctggagcaggtggagcgaggctacaggatgccctgcccgcaggactgccccatctctctgcatgagctcatgatccactgctggaaaaaggaccctgaagaacgccccacttttgagtacttgcagagcttcctgaaagactactttaccgcgacagagccccagtaccaacctggtgaaaacctgtaa

SEQ ID NO: 412 - DNA, 4029 bp, Homo sapiens
atgagggcgaacgacgctctgcaggtgctgggcttgcttttcagcctggcccggggctccgaggtgggcaactctcaggcagtgtgtcctgggactctgaatggcctgagtgtgaccggcgatgctgagaaccaataccagacactgtacaagctctacgagaggtgtgaggtggtgatggggaaccttgagattgtgctcacgggacacaatgccgacctctccttcctgcagtggattcgagaagtgacaggctatgtcctcgtggccatgaatgaattctctactctaccattgcccaacctccgcgtggtgcgagggacccaggtctacgatgggaagtttgccatcttcgtcatgttgaactataacaccaaatccagccacgctctgcgccagctccgcttgactcagctcaccgagattctgtcagggggtgtttatattgagaagaacgataagctttgtcacatggacacaattgactggagggacatcgtgagggaccgagatgctgagatagtggtgaaggacaatggcagaagctgtcccccctgtcatgaggtttgcaaggggcgatgctggggtcctggatcagaagactgccagacattgaccaagaccatctgtgctcctcagtgtaatggtcactgctttgggcccaaccccaaccagtgctgccatgatgagtgtgccgggggctgctcaggccctcaggacacagactgctttgcctgccggcacttcaatgacagtggagcctgtgtacctcgctgtccacagcctcttgtctacaacaagctaactttccagctggaacccaatccccacaccaagtatcagtatggaggagtttgtgtagccagctgtccccataactttgtggtggatcaaacatcctgtgtcagggcctgtcctcctgacaagatggaagtagataaaaatgggctcaagatgtgtgagccttgtgggggactatgtcccaaagcctgtgagggaacaggctctgggagccgcttccagactgtggactcgagcaacattgatggatttgtgaactgcaccaagatcctgggcaacctggactttctgatcaccggcctcaatggagacccctggcacaagatccctgccctggacccagagaagctcaatgtcttccggacagtacgggagatcacaggttacctgaacatccagtcctggccgccccacatgcacaacttcagtgttttttccaatttgacaaccattggaggcagaagcctctacaaccggggcttctcattgttgatcatgaagaacttgaatgtcacatctctgggcttccgatccctgaaggaaattagtgctgggcgtatctatataagtgccaataggcagctctgctaccaccactctttgaactggaccaaggtgcttcgggggcctacggaagagcgactagacatcaagcataatcggccgcgcagagactgcgtggcagagggcaaagtgtgtgacccactgtgctcctctgggggatgctggggcccaggccctggtcagtgcttgtcctgtcgaaattatagccgaggaggtgtctgtgtgacccactgcaactttctgaatggggagcctcgagaatttgcccatgaggccgaatgcttctcctgccacccggaatgccaacccatggagggcactgccacatgcaatggctcgggctctgatacttgtgctcaatgtgcccattttcgagatgggccccactgtgtgagcagctgcccccatggagtcctaggtgccaagggcccaatctacaagtacccagatgttcagaatgaatgtcggccctgccatgagaactgcacccaggggtgtaaaggaccagagcttcaagactgtttaggacaaacactggtgctgatcggcaaaacccatctgacaatggctttgacagtgatagcaggattggtagtgattttcatgatgctgggcggcacttttctctactggcgtgggcgccggattcagaataaaagggctatgaggcgatacttggaacggggtgagagcatagagcctctggaccccagtgagaaggctaacaaagtcttggccagaatcttcaaagagacagagctaaggaagcttaaagtgcttggctcgggtgtctttggaactgtgcacaaaggagtgtggatccctgagggtgaatcaatcaagattccagtctgcattaaagtcattgaggacaagagtggacggcagagttttcaagctgtgacagatcatatgctggccattggcagcctggaccatgcccacattgtaaggctgctgggactatgcccagggtcatctctgcagcttgtcactcaatatttgcctctgggttctctgctggatcatgtgagacaacaccggggggcactggggccacagctgctgctcaactggggagtacaaattgccaagggaatgtactaccttgaggaacatggtatggtgcatagaaacctggctgcccgaaacgtgctactcaagtcacccagtcaggttcaggtggcagattttggtgtggctgacctgctgcctcctgatgataagcagctgctatacagtgaggccaagactccaattaagtggatggcccttgagagtatccactttgggaaatacacacaccagagtgatgtctggagctatggtgtgacagtttgggagttgatgaccttcggggcagagccctatgcagggctacgattggctgaagtaccagacctgctagagaagggggagcggttggcacagccccagatctgcacaattgatgtctacatggtgatggtcaagtgttggatgattgatgagaacattcgcccaacctttaaagaactagccaatgagttcaccaggatggcccgagacccaccacggtatctggtcataaagagagagagtgggcctggaatagcccctgggccagagccccatggtctgacaaacaagaagctagaggaagtagagctggagccagaactagacctagacctagacttggaagcagaggaggacaacctggcaaccaccacactgggctccgccctcagcctaccagttggaacacttaatcggccacgtgggagccagagccttttaagtccatcatctggatacatgcccatgaaccagggtaatcttggggagtcttgccaggagtctgcagtttctgggagcagtgaacggtgcccccgtccagtctctctacacccaatgccacggggatgcctggcatcagagtcatcagaggggcatgtaacaggctctgaggctgagctccaggagaaagtgtcaatgtgtaggagccggagcaggagccggagcccacggccacgcggagatagcgcctaccattcccagcgccacagtctgctgactcctgttaccccactctccccacccgggttagaggaagaggatgtcaacggttatgtcatgccagatacacacctcaaaggtactccctcctcccgggaaggcaccctttcttcagtgggtctcagttctgtcctgggtactgaagaagaagatgaagatgaggagtatgaatacatgaaccggaggagaaggcacagtccacctcatccccctaggccaagttcccttgaggagctgggttatgagtacatggatgtggggtcagacctcagtgcctctctgggcagcacacagagttgcccactccaccctgtacccatcatgcccactgcaggcacaactccagatgaagactatgaatatatgaatcggcaacgagatggaggtggtcctgggggtgattatgcagccatgggggcctgcccagcatctgagcaagggtatgaagagatgagagcttttcaggggcctggacatcaggccccccatgtccattatgcccgcctaaaaactctacgtagcttagaggctacagactctgcctttgataaccctgattactggcatagcaggcttttccccaaggctaatgcccagagaacgtaa

SEQ ID NO: 413 - DNA, 3768 bp, Homo sapiens
atggagctggcggccttgtgccgctgggggctcctcctcgccctcttgccccccggagccgcgagcacccaagtgtgcaccggcacagacatgaagctgcggctccctgccagtcccgagacccacctggacatgctccgccacctctaccagggctgccaggtggtgcagggaaacctggaactcacctacctgcccaccaatgccagcctgtccttcctgcaggatatccaggaggtgcagggctacgtgctcatcgctcacaaccaagtgaggcaggtcccactgcagaggctgcggattgtgcgaggcacccagctctttgaggacaactatgccctggccgtgctagacaatggagacccgctgaacaataccacccctgtcacaggggcctccccaggaggcctgcgggagctgcagcttcgaagcctcacagagatcttgaaaggaggggtcttgatccagcggaacccccagctctgctaccaggacacgattttgtggaaggacatcttccacaagaacaaccagctggctctcacactgatagacaccaaccgctctcgggcctgccacccctgttctccgatgtgtaagggctcccgctgctggggagagagttctgaggattgtcagagcctgacgcgcactgtctgtgccggtggctgtgcccgctgcaaggggccactgcccactgactgctgccatgagcagtgtgctgccggctgcacgggccccaagcactctgactgcctggcctgcctccacttcaaccacagtggcatctgtgagctgcactgcccagccctggtcacctacaacacagacacgtttgagtccatgcccaatcccgagggccggtatacattcggcgccagctgtgtgactgcctgtccctacaactacctttctacggacgtgggatcctgcaccctcgtctgccccctgcacaaccaagaggtgacagcagaggatggaacacagcggtgtgagaagtgcagcaagccctgtgcccgagtgtgctatggtctgggcatggagcacttgcgagaggtgagggcagttaccagtgccaatatccaggagtttgctggctgcaagaagatctttgggagcctggcatttctgccggagagctttgatggggacccagcctccaacactgccccgctccagccagagcagctccaagtgtttgagactctggaagagatcacaggttacctatacatctcagcatggccggacagcctgcctgacctcagcgtcttccagaacctgcaagtaatccggggacgaattctgcacaatggcgcctactcgctgaccctgcaagggctgggcatcagctggctggggctgcgctcactgagggaactgggcagtggactggccctcatccaccataacacccacctctgcttcgtgcacacggtgccctgggaccagctctttcggaacccgcaccaagctctgctccacactgccaaccggccagaggacgagtgtgtgggcgagggcctggcctgccaccagctgtgcgcccgagagcactgctggggtccagggcccacccagtgtgtcaactgcagccagttccttcggggccaggagtgcgtggaggaatgccgagtactgcaggggctccccagggagtatgtgaatgccaggcactgtttgccgtgccaccctgagtgtcagccccagaatggctcagtgacctgttttggaccggaggctgaccagtgtgtggcctgtgcccactataaggaccctcccttctgcgtggcccgctgccccagcggtgtgaaacctgacctctcctacatgcccatctggaagtttccagatgaggagggcgcatgccagccttgccccatcaactgcacccactcctgtgtggacctggatgacaagggctgccccgccgagcagagagccagccctctgacgtccatcatctctgcggtggttggcattctgctggtcgtggtcttgggggtggtctttgggatcctcatcaagcgacggcagcagaagatccggaagtacacgatgcggagactgctgcaggaaacggagctggtggagccgctgacacctagcggagcgatgcccaaccaggcgcagatgcggatcctgaaagagacggagctgaggaaggtgaaggtgcttggatctggcgcttttggcacagtctacaagggcatctggatccctgatggggagaatgtgaaaattccagtggccatcaaagtgttgagggaaaacacatcccccaaagccaacaaagaaatcttagacgaagcatacgtgatggctggtgtgggctccccatatgtctcccgccttctgggcatctgcctgacatccacggtgcagctggtgacacagcttatgccctatggctgcctcttagaccatgtccgggaaaaccgcggacgcctgggctcccaggacctgctgaactggtgtatgcagattgccaaggggatgagctacctggaggatgtgcggctcgtacacagggacttggccgctcggaacgtgctggtcaagagtcccaaccatgtcaaaattacagacttcgggctggctcggctgctggacattgacgagacagagtaccatgcagatgggggcaaggtgcccatcaagtggatggcgctggagtccattctccgccggcggttcacccaccagagtgatgtgtggagttatggtgtgactgtgtgggagctgatgacttttggggccaaaccttacgatgggatcccagcccgggagatccctgacctgctggaaaagggggagcggctgccccagccccccatctgcaccattgatgtctacatgatcatggtcaaatgttggatgattgactctgaatgtcggccaagattccgggagttggtgtctgaattctcccgcatggccagggacccccagcgctttgtggtcatccagaatgaggacttgggcccagccagtcccttggacagcaccttctaccgctcactgctggaggacgatgacatgggggacctggtggatgctgaggagtatctggtaccccagcagggcttcttctgtccagaccctgccccgggcgctgggggcatggtccaccacaggcaccgcagctcatctaccaggagtggcggtggggacctgacactagggctggagccctctgaagaggaggcccccaggtctccactggcaccctccgaaggggctggctccgatgtatttgatggtgacctgggaatgggggcagccaaggggctgcaaagcctccccacacatgaccccagccctctacagcggtacagtgaggaccccacagtacccctgccctctgagactgatggctacgttgcccccctgacctgcagcccccagcctgaatatgtgaaccagccagatgttcggccccagcccccttcgccccgagagggccctctgcctgctgcccgacctgctggtgccactctggaaaggcccaagactctctccccagggaagaatggggtcgtcaaagacgtttttgcctttgggggtgccgtggagaaccccgagtacttgacaccccagggaggagctgcccctcagccccaccctcctcctgccttcagcccagccttcgacaacctctattactgggaccaggacccaccagagcggggggctccacccagcaccttcaaagggacacctacggcagagaacccagagtacctgggtctggacgtgccagtgtga

SEQ ID NO: 414 - DNA, 4029 bp, Homo sapiens
atgagggcgaacgacgctctgcaggtgctgggcttgcttttcagcctggcccggggctccgaggtgggcaactctcaggcagtgtgtcctgggactctgaatggcctgagtgtgaccggcgatgctgagaaccaataccagacactgtacaagctctacgagaggtgtgaggtggtgatggggaaccttgagattgtgctcacgggacacaatgccgacctctccttcctgcagtggattcgagaagtgacaggctatgtcctcgtggccatgaatgaattctctactctaccattgcccaacctccgcgtggtgcgagggacccaggtctacgatgggaagtttgccatcttcgtcatgttgaactataacaccaactccagccacgctctgcgccagctccgcttgactcagctcaccgagattctgtcagggggtgtttatattgagaagaacgataagctttgtcacatggacacaattgactggagggacatcgtgagggaccgagatgctgagatagtggtgaaggacaatggcagaagctgtcccccctgtcatgaggtttgcaaggggcgatgctggggtcctggatcagaagactgccagacattgaccaagaccatctgtgctcctcagtgtaatggtcactgctttgggcccaaccccaaccagtgctgccatgatgagtgtgccgggggctgctcaggccctcaggacacagactgctttgcctgccggcacttcaatgacagtggagcctgtgtacctcgctgtccacagcctcttgtctacaacaagctaactttccagctggaacccaatccccacaccaagtatcagtatggaggagtttgtgtagccagctgtccccataactttgtggtggatcaaacatcctgtgtcagggcctgtcctcctgacaagatggaagtagataaaaatgggctcaagatgtgtgagccttgtgggggactatgtcccaaagcctgtgagggaacaggctctgggagccgcttccagactgtggactcgagcaacattgatggatttgtgaactgcaccaagatcctgggcaacctggactttctgatcaccggcctcaatggagacccctggcacaagatccctgccctggacccagagaagctcaatgtcttccggacagtacgggagatcacaggttacctgaacatccagtcctggccgccccacatgcacaacttcagtgttttttccaatttgacaaccattggaggcagaagcctctacaaccggggcttctcattgttgatcatgaagaacttgaatgtcacatctctgggcttccgatccctgaaggaaattagtgctgggcgtatctatataagtgccaataggcagctctgctaccaccactctttgaactggaccaaggtgcttcgggggcctacggaagagcgactagacatcaagcataatcggccgcgcagagactgcgtggcagagggcaaagtgtgtgacccactgtgctcctctgggggatgctggggcccaggccctggtcagtgcttgtcctgtcgaaattatagccgaggaggtgtctgtgtgacccactgcaactttctgaatggggagcctcgagaatttgcccatgaggccgaatgcttctcctgccacccggaatgccaacccatggagggcactgccacatgcaatggctcgggctctgatacttgtgctcaatgtgcccattttcgagatgggccccactgtgtgagcagctgcccccatggagtcctaggtgccaagggcccaatctacaagtacccagatgttcagaatgaatgtcggccctgccatgagaactgcacccaggggtgtaaaggaccagagcttcaagactgtttaggacaaacactggtgctgatcggcaaaacccatctgacaatggctttgacagtgatagcaggattggtagtgattttcatgatgctgggcggcacttttctctactggcatgggcgccggattcagaataaaagggctatgaggcgatacttggaacggggtgagagcatagagcctctggaccccagtgagaaggctaacaaagtcttggccagaatcttcaaagagacagagctaaggaagcttaaagtgcttggctcgggtgtctttggaactgtgcacaaaggagtgtggatccctgagggtgaatcaatcaagattccagtctgcattaaagtcattgaggacaagagtggacggcagagttttcaagctgtgacagatcatatgctggccattggcagcctggaccatgcccacattgtaaggctgctgggactatgcccagggtcatctctgcagcttgtcactcaatatttgcctctgggttctctgctggatcatgtgagacaacaccggggggcactggggccacagctgctgctcaactggggagtacaaattgccaagggaatgtactaccttgaggaacatggtatggtgcatagaaacctggctgcccgaaacgtgctactcaagtcacccagtcaggttcaggtggcagattttggtgtggctgacctgctgcctcctgatgataagcagctgctatacagtgaggccaagactccaattaagtggatggcccttgagagtatccactttgggaaatacacacaccagagtgatgtctggagctatggtgtgacagtttgggagttgatgaccttcggggcagagccctatgcagggctacgattggctgaagtaccagacctgctagagaagggggagcggttggcacagccccagatctgcacaattgatgtctacatggtgatggtcaagtgttggatgattgatgagaacattcgcccaacctttaaagaactagccaatgagttcaccaggatggcccgagacccaccacggtatctggtcataaagagagagagtgggcctggaatagcccctgggccagagccccatggtctgacaaacaagaagctagaggaagtagagctggagccagaactagacctagacctagacttggaagcagaggaggacaacctggcaaccaccacactgggctccgccctcagcctaccagttggaacacttaatcggccacgtgggagccagagccttttaagtccatcatctggatacatgcccatgaaccagggtaatcttggggagtcttgccaggagtctgcagtttctgggagcagtgaacggtgcccccgtccagtctctctacacccaatgccacggggatgcctggcatcagagtcatcagaggggcatgtaacaggctctgaggctgagctccaggagaaagtgtcaatgtgtaggagccggagcaggagccggagcccacggccacgcggagatagcgcctaccattcccagcgccacagtctgctgactcctgttaccccactctccccacccgggttagaggaagaggatgtcaacggttatgtcatgccagatacacacctcaaaggtactccctcctcccgggaaggcaccctttcttcagtgggtctcagttctgtcctgggtactgaagaagaagatgaagatgaggagtatgaatacatgaaccggaggagaaggcacagtccacctcatccccctaggccaagttcccttgaggagctgggttatgagtacatggatgtggggtcagacctcagtgcctctctgggcagcacacagagttgcccactccaccctgtacccatcatgcccactgcaggcacaactccagatgaagactatgaatatatgaatcggcaacgagatggaggtggtcctgggggtgattatgcagccatgggggcctgcccagcatctgagcaagggtatgaagagatgagagcttttcaggggcctggacatcaggccccccatgtccattatgcccgcctaaaaactctacgtagcttagaggctacagactctgcctttgataaccctgattactggcatagcaggcttttccccaaggctaatgcccagagaacgtaa

SEQ ID NO: 415 - DNA, 3768 bp, Homo sapiens
atggagctggcggccttgtgccgctgggggctcctcctcgccctcttgccccccggagccgcgagcacccaagtgtgcaccggcacagacatgaagctgcggctccctgccagtcccgagacccacctggacatgctccgccacctctaccagggctgccaggtggtgcagggaaacctggaactcacctacctgcccaccaatgccagcctgtccttcctgcaggatatccaggaggtgcagggctacgtgctcatcgctcacaaccaagtgaggcaggtcccactgcagaggctgcggattgtgcgaggcacccagctctttgaggacaactatgccctggccgtgctagacaatggagacccgctgaacaataccacccctgtcacaggggcctccccaggaggcctgcgggagctgcagcttcgaagcctcacagagatcttgaaaggaggggtcttgatccagcggaacccccagctctgctaccaggacacgattttgtggaaggacatcttccacaagaacaaccagctggctctcacactgatagacaccaaccgctctcgggcctgccacccctgttctccgatgtgtaagggctcccgctgctggggagagagttctgaggattgtcagagcctgacgcgcactgtctgtgccggtggctgtgcccgctgcaaggggccactgcccactgactgctgccatgagcagtgtgctgccggctgcacgggccccaagcactctgactgcctggcctgcctccacttcaaccacagtggcatctgtgagctgcactgcccagccctggtcacctacaacacagacacgtttgagtccatgcccaatcccgagggccggtatacattcggcgccagctgtgtgactgcctgtccctacaactacctttctacggacgtgggatcctgcaccctcgtctgccccctgcacaaccaagaggtgacagcagaggatggaacacagcggtgtgagaagtgcagcaagccctgtgcccgagtgtgctatggtctgggcatggagcacttgcgagaggtgagggcagttaccagtgccaatatccaggagtttgctggctgcaagaagatctttgggagcctggcatttctgccggagagctttgatggggacccagcctccaacactgccccgctccagccagagcagctccaagtgtttgagactctggaagagatcacaggttacctatacatctcagcatggccggacagcctgcctgacctcagcgtcttccagaacctgcaagtaatccggggacgaattctgcacaatggcgcctactcgctgaccctgcaagggctgggcatcagctggctggggctgcgctcactgagggaactgggcagtggactggccctcatccaccataacacccacctctgcttcgtgcacacggtgccctgggaccagctctttcggaacccgcaccaagctctgctccacactgccaaccggccagaggacgagtgtgtgggcgagggcctggcctgccaccagctgtgcgcccgagggcactgctggggtccagggcccacccagtgtgtcaactgcagccagttccttcggggccaggagtgcgtggaggaatgccgagtactgcaggggctccccagggagtatgtgaatgccaggcactgtttgccgtgccaccctgagtgtcagccccagaatggctcagtgacctgttttggaccggaggctgaccagtgtgtggcctgtgcccactataaggaccctcccttctgcgtggcccgctgccccagcggtgtgaaacctgacctctcctacatgcccatctggaagtttccagatgaggagggcgcatgccagccttgccccatcaactgcacccactcctgtgtggacctggatgacaagggctgccccgccgagcagagagccagccctctgacgtccatcatctctgcggtggttggcattctgctggtcgtggtcttgggggtggtctttgggatcctcatcaagcgacggcagcagaagatccggaagtacacgatgcggagactgctgcaggaaacggagctggtggagccgctgacacctagcggagcgatgcccaaccaggcgcagatgcggatcctgaaagagacggagctgaggaaggtgaaggtgcttggatctggcgcttttggcacagtctacaagggcatctggatccctgatggggagaatgtgaaaattccagtggccatcaaagtgttgagggaaaacacatcccccaaagccaacaaagaaatcttagacgaagcatacgtgatggctggtgtgggctccccatatgtctcccgccttctgggcatctgcctgacatccacggtgcagctggtgacacagcttatgccctatggctgcctcttagaccatgtccgggaaaaccgcggacgcctgggctcccaggacctgctgaactggtgtatgcagattgtcaaggggatgagctacctggaggatgtgcggctcgtacacagggacttggccgctcggaacgtgctggtcaagagtcccaaccatgtcaaaattacagacttcgggctggctcggctgctggacattgacgagacagagtaccatgcagatgggggcaaggtgcccatcaagtggatggcgctggagtccattctccgccggcggttcacccaccagagtgatgtgtggagttatggtgtgactgtgtgggagctgatgacttttggggccaaaccttacgatgggatcccagcccgggagatccctgacctgctggaaaagggggagcggctgccccagccccccatctgcaccattgatgtctacatgatcatggtcaaatgttggatgattgactctgaatgtcggccaagattccgggagttggtgtctgaattctcccgcatggccagggacccccagcgctttgtggtcatccagaatgaggacttgggcccagccagtcccttggacagcaccttctaccgctcactgctggaggacgatgacatgggggacctggtggatgctgaggagtatctggtaccccagcagggcttcttctgtccagaccctgccccgggcgctgggggcatggtccaccacaggcaccgcagctcatctaccaggagtggcggtggggacctgacactagggctggagccctctgaagaggaggcccccaggtctccactggcaccctccgaaggggctggctccgatgtatttgatggtgacctgggaatgggggcagccaaggggctgcaaagcctccccacacatgaccccagccctctacagcggtacagtgaggaccccacagtacccctgccctctgagactgatggctacgttgcccccctgacctgcagcccccagcctgaatatgtgaaccagccagatgttcggccccagcccccttcgccccgagagggccctctgcctgctgcccgacctgctggtgccactctggaaaggcccaagactctctccccagggaagaatggggtcgtcaaagacgtttttgcctttgggggtgccgtggagaaccccgagtacttgacaccccagggaggagctgcccctcagccccaccctcctcctgccttcagcccagccttcgacaacctctattactgggaccaggacccaccagagcggggggctccacccagcaccttcaaagggacacctacggcagagaacccagagtacctgggtctggacgtgccagtgtga

SEQ ID NO: 416 - DNA, 3768 bp, Homo sapiens
atggagctggcggccttgtgccgctgggggctcctcctcgccctcttgccccccggagccgcgagcacccaagtgtgcaccggcacagacatgaagctgcggctccctgccagtcccgagacccacctggacatgctccgccacctctaccagggctgccaggtggtgcagggaaacctggaactcacctacctgcccaccaatgccagcctgtccttcctgcaggatatccaggaggtgcagggctacgtgctcatcgctcacaaccaagtgaggcaggtcccactgcagaggctgcggattgtgcgaggcacccagctctttgaggacaactatgccctggccgtgctagacaatggagacccgctgaacaataccacccctgtcacaggggcctccccaggaggcctgcgggagctgcagcttcgaagcctcacagagatcttgaaaggaggggtcttgatccagcggaacccccagctctgctaccaggacacgattttgtggaaggacatcttccacaagaacaaccagctggctctcacactgatagacaccaaccgctctcgggcctgccacccctgttctccgatgtgtaagggctcccgctgctggggagagagttctgaggattgtcagagcctgacgcgcactgtctgtgccggtggctgtgcccgctgcaaggggccactgcccactgactgctgccatgagcagtgtgctgccggctgcacgggccccaagcactctgactgcctggcctgcctccacttcaaccacagtggcatctgtgagctgcactgcccagccctggtcacctacaacacagacacgtttgagtccatgcccaatcccgagggccggtatacattcggcgccagctgtgtgactgcctgtccctacaactacctttctacggacgtgggatcctgcaccctcgtctgccccctgcacaaccaagaggtgacagcagaggatggaacacagcggtgtgagaagtgcagcaagccctgtgcccgagtgtgctatggtctgggcatggagcacttgcgagaggtgagggcagttaccagtgccaatatccaggagtttgctggctgcaagaagatctttgggagcctggcatttctgccggagagctttgatggggacccagcctccaacactgccccgctccagccagagcagctccaagtgtttgagactctggaagagatcacaggttacctatacatctcagcatggccggacagcctgcctgacctcagcgtcttccagaacctgcaagtaatccggggacgaattctgcacaatggcgcctactcgctgaccctgcaagggctgggcatcagctggctggggctgcgctcactgagggaactgggcagtggactggccctcatccaccataacacccacctctgcttcgtgcacacggtgccctgggaccagctctttcggaacccgcaccaagctctgctccacactgccaaccggccagaggacgagtgtgtgggcgagggcctggcctgccaccagctgtgcgcccgagggcactgctggggtccagggcccacccagtgtgtcaactgcagccagttccttcggggccaggagtgcgtggaggaatgccgagtactgcaggggctccccagggagtatgtgaatgccaggcactgtttgccgtgccaccctgagtgtcagccccagaatggctcagtgacctgttttggaccggaggctgaccagtgtgtggcctgtgcccactataaggaccctcccttctgcgtggcccgctgccccagcggtgtgaaacctgacctctcctacatgcccatctggaagtttccagatgaggagggcgcatgccagccttgccccatcaactgcacccactcctgtgtggacctggatgacaagggctgccccgccgagcagagagccagccctctgacgtccatcatctctgcggtggttggcattctgctggtcgtggtcttgggggtggtctttgggatcctcatcaagcgacggcagcagaagatccggaagtacacgatgcggagactgctgcaggaaacggagctggtggagccgctgacacctagcggagcgatgcccaaccaggcgcagatgcggatcctgaaagagacggagctgaggaaggtgaaggtgcttggatctggcgcttttggcacagtctacaagggcatctggatccctgatggggagaatgtgaaaattccagtggccatcaaagtgttgagggaaaacacatcccccaaagccaacaaagaaatcttagacgaagcatacgtgatggctggtgtgggctccccatatgtctcccgccttctgggcatctgcctgacatccacggtgcagctggtgacacagcttatgccctatggctgcctcttagaccatgtccgggaaaaccgcggacgcctgggctcccaggacctgctgaactggtgtatgcagattgccaaggggatgagctacctggaggatgtgcggctcgtacacagggacttggccgctcggaacgtgctggtcaagagtcccaaccatgtcaaaattacagacttcgggctggctcggctgctggacattgacgagacagagtaccatgcagatgggggcaaggtgcccatcaagtggatggcgctggagtccattctccgccggcggttcacccaccagagtgatgtgtggagttatggtgtgactgtgtgggagctgatgacttttggggccaaaccttacgatgggatcccagcccgggatatccctgacctgctggaaaagggggagcggctgccccagccccccatctgcaccattgatgtctacatgatcatggtcaaatgttggatgattgactctgaatgtcggccaagattccgggagttggtgtctgaattctcccgcatggccagggacccccagcgctttgtggtcatccagaatgaggacttgggcccagccagtcccttggacagcaccttctaccgctcactgctggaggacgatgacatgggggacctggtggatgctgaggagtatctggtaccccagcagggcttcttctgtccagaccctgccccgggcgctgggggcatggtccaccacaggcaccgcagctcatctaccaggagtggcggtggggacctgacactagggctggagccctctgaagaggaggcccccaggtctccactggcaccctccgaaggggctggctccgatgtatttgatggtgacctgggaatgggggcagccaaggggctgcaaagcctccccacacatgaccccagccctctacagcggtacagtgaggaccccacagtacccctgccctctgagactgatggctacgttgcccccctgacctgcagcccccagcctgaatatgtgaaccagccagatgttcggccccagcccccttcgccccgagagggccctctgcctgctgcccgacctgctggtgccactctggaaaggcccaagactctctccccagggaagaatggggtcgtcaaagacgtttttgcctttgggggtgccgtggagaaccccgagtacttgacaccccagggaggagctgcccctcagccccaccctcctcctgccttcagcccagccttcgacaacctctattactgggaccaggacccaccagagcggggggctccacccagcaccttcaaagggacacctacggcagagaacccagagtacctgggtctggacgtgccagtgtga

SEQ ID NO: 417 - DNA, 3768 bp, Homo sapiens
atggagctggcggccttgtgccgctgggggctcctcctcgccctcttgccccccggagccgcgagcacccaagtgtgcaccggcacagacatgaagctgcggctccctgccagtcccgagacccacctggacatgctccgccacctctaccagggctgccaggtggtgcagggaaacctggaactcacctacctgcccaccaatgccagcctgtccttcctgcaggatatccaggaggtgcagggctacgtgctcatcgctcacaaccaagtgaggcaggtcccactgcagaggctgcggattgtgcgaggcacccagctctttgaggacaactatgccctggccgtgctagacaatggagacccgctgaacaataccacccctgtcacaggggcctccccaggaggcctgcgggagctgcagcttcgaagcctcacagagatcttgaaaggaggggtcttgatccagcggaacccccagctctgctaccaggacacgattttgtggaaggacatcttccacaagaacaaccagctggctctcacactgatagacaccaaccgctctcgggcctgccacccctgttctccgatgtgtaagggctcccgctgctggggagagagttctgaggattgtcagagcctgacgcgcactgtctgtgccggtggctgtgcccgctgcaaggggccactgcccactgactgctgccatgagcagtgtgctgccggctgcacgggccccaagcactctgactgcctggcctgcctccacttcaaccacagtggcatctgtgagctgcactgcccagccctggtcacctacaacacagacacgtttgagtccatgcccaatcccgagggccggtatacattcggcgccagctgtgtgactgcctgtccctacaactacctttctacggacgtgggatcctgcaccctcgtctgccccctgcacaaccaagaggtgacagcagaggatggaacacagcggtgtgagaagtgcagcaagccctgtgcccgagtgtgctatggtctgggcatggagcacttgcgagaggtgagggcagttaccagtgccaatatccaggagtttgctggctgcaagaagatctttgggagcctggcatttctgccggagagctttgatggggacccagcctccaacactgccccgctccagccagagcagctccaagtgtttgagactctggaagagatcacaggttacctatacatctcagcatggccggacagcctgcctgacctcagcgtcttccagaacctgcaagtaatccggggacgaattctgcacaatggcgcctactcgctgaccctgcaagggctgggcatcagctggctggggctgcgctcactgagggaactgggcagtggactggccctcatccaccataacacccacctctgcttcgtgcacacggtgccctgggaccagctctttcggaacccgcaccaagctctgctccacactgccaaccggccagaggacgagtgtgtgggcgagggcctggcctgccaccagctgtgcgcccgagggcactgctggggtccagggcccacccagtgtgtcaactgcagccagttccttcggggccaggagtgcgtggaggaatgccgagtactgcaggggctccccagggagtatgtgaatgccaggcactgtttgccgtgccaccctgagtgtcagccccagaatggctcagtgacctgttttggaccggaggctgaccagtgtgtggcctgtgcccactataaggaccctcccttctgcgtggcccgctgccccagcggtgtgaaacctgacctctcctacatgcccatctggaagtttccagatgaggagggcgcatgccagccttgccccatcaactgcacccactcctgtgtggacctggatgacaagggctgccccgccgagcagagagccagccctctgacgtccatcatctctgcggtggttggcattctgctggtcgtggtcttgggggtggtctttgggatcctcatcaagcgacggcagcagaagatccggaagtacacgatgcggagactgctgcaggaaacggagctggtggagccgctgacacctagcggagcgatgcccaaccaggcgcagatgcggatcctgaaagagacggagctgaggaaggtgaaggtgcttggatctggcgcttttggcacagtctacaagggcatctggatccctgatggggagaatgtgaaaattccagtggccatcaaagtgttgagggaaaacacatcccccaaagccaacaaagaaatcttagacgaagcatacgtgatggctggtgtgggctccccatatgtctcccgccttctgggcatctgcctgacatccacggtgcagctggtgacacagcttatgccctatggctgcctcttagaccatgtccgggaaaaccgcggacgcctgggctcccaggacctgctgaactggtgtatgcagattgccaaggggatgagctacctggaggatgtgcggctcgtacacagggacttggccgctcggaacgtgctggtcaagagtcccaaccatgtcaaaattacagacttcgggctggctcggctgctggacattgacgagacagagtaccatgcagatgggggcaaggtgcccatcaagtggatggcgctggagtccattctccgccggcggttcacccaccagagtgatgtgtggagttatggtgtgactgtgtgggagctgatgacttttggggccaaaccttacgatgggatcccagcccgggagatccctgacctgctggaaaagggggagcggctgccccagccccccatctgcaccattgatgtctacatgatcatggtcaaatgttggatgattgactctgaatgtcggccaagattccgggagttggtgtctgaattctcccgcatggccagggacccccagcgctttgtggtcatccagaatgaggacttgggcccagccagtcccttggacagcaccttctaccgctcactgctggaggacgatgacatggaggacctggtggatgctgaggagtatctggtaccccagcagggcttcttctgtccagaccctgccccgggcgctgggggcatggtccaccacaggcaccgcagctcatctaccaggagtggcggtggggacctgacactagggctggagccctctgaagaggaggcccccaggtctccactggcaccctccgaaggggctggctccgatgtatttgatggtgacctgggaatgggggcagccaaggggctgcaaagcctccccacacatgaccccagccctctacagcggtacagtgaggaccccacagtacccctgccctctgagactgatggctacgttgcccccctgacctgcagcccccagcctgaatatgtgaaccagccagatgttcggccccagcccccttcgccccgagagggccctctgcctgctgcccgacctgctggtgccactctggaaaggcccaagactctctccccagggaagaatggggtcgtcaaagacgtttttgcctttgggggtgccgtggagaaccccgagtacttgacaccccagggaggagctgcccctcagccccaccctcctcctgccttcagcccagccttcgacaacctctattactgggaccaggacccaccagagcggggggctccacccagcaccttcaaagggacacctacggcagagaacccagagtacctgggtctggacgtgccagtgtga

SEQ ID NO: 418 - DNA, 3768 bp, Homo sapiens
atggagctggcggccttgtgccgctgggggctcctcctcgccctcttgccccccggagccgcgagcacccaagtgtgcaccggcacagacatgaagctgcggctccctgccagtcccgagacccacctggacatgctccgccacctctaccagggctgccaggtggtgcagggaaacctggaactcacctacctgcccaccaatgccagcctgtccttcctgcaggatatccaggaggtgcagggctacgtgctcatcgctcacaaccaagtgaggcaggtcccactgcagaggctgcggattgtgcgaggcacccagctctttgaggacaactatgccctggccgtgctagacaatggagacccgctgaacaataccacccctgtcacaggggcctccccaggaggcctgcgggagctgcagcttcgaagcctcacagagatcttgaaaggaggggtcttgatccagcggaacccccagctctgctaccaggacacgattttgtggaaggacatcttccacaagaacaaccagctggctctcacactgatagacaccaaccgctctcgggcctgccacccctgttctccgatgtgtaagggctcccgctgctggggagagagttctgaggattgtcagagcctgacgcgcactgtctgtgccggtggctgtgcccgctgcaaggggccactgcccactgactgctgccatgagcagtgtgctgccggctgcacgggccccaagcactctgactgcctggcctgcctccacttcaaccacagtggcatctgtgagctgcactgcccagccctggtcacctacaacacagacacgtttgagtccatgcccaatcccgagggccggtatacattcggcgccagctgtgtgactgcctgtccctacaactacctttctacggacgtgggatcctgcaccctcgtctgccccctgcacaaccaagaggtgacagcagaggatggaacacagcggtgtgagaagtgcagcaagccctgtgcccgagtgtgctatggtctgggcatggagcacttgcgagaggtgagggcagttaccagtgccaatatccaggagtttgctggctgcaagaagatctttgggagcctggcatttctgccggagagctttgatggggacccagcctccaacactgccccgctccagccagagcagctccaagtgtttgagactctggaagagatcacaggttacctatacatctcagcatggccggacagcctgcctgacctcagcgtcttccagaacctgcaagtaatccggggacgaattctgcacaatggcgcctactcgctgaccctgcaagggctgggcatcagctggctggggctgcgctcactgagggaactgggcagtggactggccctcatccaccataacacccacctctgcttcgtgcacacggtgccctgggaccagctctttcggaacccgcaccaagctctgctccacactgccaaccggccagaggacgagtgtgtgggcgagggcctggcctgccaccagctgtgcgcccgagggcactgctggggtccagggcccacccagtgtgtcaactgcagccagttccttcggggccaggagtgcgtggaggaatgccgagtactgcaggggctccccagggagtatgtgaatgccaggcactgtttgccgtgccaccctgagtgtcagccccagaatggctcagtgacctgttttggaccggaggctgaccagtgtgtggcctgtgcccactataaggaccctcccttctgcgtggcccgctgccccagcggtgtgaaacctgacctctcctacatgcccatctggaagtttccagatgaggagggcgcatgccagccttgccccatcaactgcacccactcctgtgtggacctggatgacaagggctgccccgccgagcagagagccagccctctgacgtccatcatctctgcggtggttggcattctgctggtcgtggtcttgggggtggtctttgggatcctcatcaagcgacggcagcagaagatccggaagtacacgatgcggagactgctgcaggaaacggagctggtggagccgctgacacctagcggagcgatgcccaaccaggcgcagatgcggatcctgaaagagacggagctgaggaaggtgaaggtgcttggatctggcgcttttggcacagtctacaagggcatctggatccctgatggggagaatgtgaaaattccagtggccatcaaagtgttgagggaaaacacatcccccaaagccaacaaagaaatcttagacgaagcatacgtgatggctggtgtgggctccccatatgtctcccgccttctgggcatctgcctgacatccacggtgcagctggtgacacagcttatgccctatggctgcctcttagaccatgtccgggaaaaccgcggacgcctgggctcccaggacctgctgaactggtgtatgcagattgccaaggggatgagctacctggaggatgtgcggctcgtacacagggacttggccgctcggaacgtgctggtcaagagtcccaaccatgtcaaaattacagacttcgggctggctcggctgctggacattgacgagacagagtaccatgcagatgggggcaaggtgcccatcaagtggatggcgctggagtccattctccgccggcggttcacccaccagagtgatgtgtggagttatggtgtgactgtgtgggagctgatgacttttggggccaaaccttacgatgggatcccagcccgggagatccctgacctgctggaaaagggggagcggctgccccagccccccatctgcaccattgatgtctacatgatcatggtcaaatgttggatgattgactctgaatgtcggccaagattccgggagttggtgtctgaattctcccgcatggccagggacccccagcgctttgtggtcatccagaatgaggacttgggcccagccagtcccttggacagcaccttctaccgctcactgctggaggacgatgacatgggggacctggtggatgctgaggagtatctggtaccccagcagggcttcttctgtccagaccctgccccgggcgctgggggcatggtccaccacaggcaccgcagctcatctaccaggagtggcggtggggacctgacactagggctggagccctctgaagaggaggcccccaggtctccactggcaccctccgaaggggctggctccgatgtatttgatggtgacctgggaatgggggcagccaaggggctgcaaagcctccccacacatgaccccagccctctacagcggtacagtgaggaccccacagtacccctgccctctgagactgatggctacgttgcccccctgacctgcagcccccagcctgaatatgtgaaccagccagatgttcggccccagcccccttcgccccgagagggccctctgcctgctgcccgacctgctggtgccactctggaaaggcccaagactctctccccagggaagaatggggtcgtcaaagacgtttttgcctttgggggtgccgtggagaaccccgagtacttgacaccccagggaggagctgcccctcagccccaccctcctcctgccttcagcccagacttcgacaacctctattactgggaccaggacccaccagagcggggggctccacccagcaccttcaaagggacacctacggcagagaacccagagtacctgggtctggacgtgccagtgtga

SEQ ID NO: 419 - DNA, 4029 bp, Homo sapiens
atgagggcgaacgacgctctgcaggtgctgggcttgcttttcagcctggcccggggctccgaggtgggcaactctcaggcagtgtgtcctgggactctgaatggcctgagtgtgaccggcgatgctgagaaccaataccagacactgtacaagctctacgagaggtgtgaggtggtgatggggaaccttgagattgtgctcacgggacacaatgccgacctctccttcctgcagtggattcgagaagtgacaggctatgtcctcgtggccatgaatgaattctctactctaccattgcccaacctccgcgtggtgcgagggacccaggtctacgatgggaagtttgccatcttcgtcatgttgaactataacaccaactccagccacgctctgcgccagctccgcttgactcagctcaccgagattctgtcagggggtgtttatattgagaagaacgataagctttgtcacatggacacaattgactggagggacatcgtgagggaccgagatgctgagatagtggtgaaggacaatggcagaagctgtcccccctgtcatgaggtttgcaaggggcgatgctggggtcctggatcagaagactgccagacattgaccaagaccatctgtgctcctcagtgtaatggtcactgctttgggcccaaccccaaccagtgctgccatgatgagtgtgccgggggctgctcaggccctcaggacacagactgctttgcctgccggcacttcaatgacagtggagcctgtgtacctcgctgtccacagcctcttgtctacaacaagctaactttccagctggaacccaatccccacaccaagtatcagtatggaggagtttgtgtagccagctgtccccataactttgtggtggatcaaacatcctgtgtcagggcctgtcctcctgacaagatggaagtagataaaaatgggctcaagatgtgtgagccttgtgggggactatgtcccaaagcctgtgagggaacaggctctgggagccgcttccagactgtggactcgagcaacattgatggatttgtgaactgcaccaagatcctgggcaacctggactttctgatcaccggcctcaatggagacccctggcacaagatccctgccctggacccagagaagctcaatgtcttccggacagtacgggagatcacaggttacctgaacatccagtcctggccgccccacatgcacaacttcagtgttttttccaatttgacaaccattggaggcagaagcctctacaaccggggcttctcattgttgatcatgaagaacttgaatgtcacatctctgggcttccgatccctgaaggaaattagtgctgggcgtatctatataagtgccaataggcagctctgctaccaccactctttgaactggaccaaggtgcttcgggggcctacggaagagcgactagacatcaagcataatcggccgcgcagagactgcgtggcagagggcaaagtgtgtgacccactgtgctcctctgggggatgctggggcccaggccctggtcagtgcttgtcctgtcgaaattatagccgaggaggtgtctgtgtgacccactgcaactttctgaatggggagcctcgagaatttgcccatgaggccgaatgcttctcctgccacccggaatgccaacccatggagggcactgccacatgcaatggctcgggctctgatacttgtgctcaatgtgcccattttcgagatgggccccactgtgtgagcagctgcccccatggagtcctaggtgccaagggcccaatctacaagtacccagatgttcagaatgaatgttggccctgccatgagaactgcacccaggggtgtaaaggaccagagcttcaagactgtttaggacaaacactggtgctgatcggcaaaacccatctgacaatggctttgacagtgatagcaggattggtagtgattttcatgatgctgggcggcacttttctctactggcgtgggcgccggattcagaataaaagggctatgaggcgatacttggaacggggtgagagcatagagcctctggaccccagtgagaaggctaacaaagtcttggccagaatcttcaaagagacagagctaaggaagcttaaagtgcttggctcgggtgtctttggaactgtgcacaaaggagtgtggatccctgagggtgaatcaatcaagattccagtctgcattaaagtcattgaggacaagagtggacggcagagttttcaagctgtgacagatcatatgctggccattggcagcctggaccatgcccacattgtaaggctgctgggactatgcccagggtcatctctgcagcttgtcactcaatatttgcctctgggttctctgctggatcatgtgagacaacaccggggggcactggggccacagctgctgctcaactggggagtacaaattgccaagggaatgtactaccttgaggaacatggtatggtgcatagaaacctggctgcccgaaacgtgctactcaagtcacccagtcaggttcaggtggcagattttggtgtggctgacctgctgcctcctgatgataagcagctgctatacagtgaggccaagactccaattaagtggatggcccttgagagtatccactttgggaaatacacacaccagagtgatgtctggagctatggtgtgacagtttgggagttgatgaccttcggggcagagccctatgcagggctacgattggctgaagtaccagacctgctagagaagggggagcggttggcacagccccagatctgcacaattgatgtctacatggtgatggtcaagtgttggatgattgatgagaacattcgcccaacctttaaagaactagccaatgagttcaccaggatggcccgagacccaccacggtatctggtcataaagagagagagtgggcctggaatagcccctgggccagagccccatggtctgacaaacaagaagctagaggaagtagagctggagccagaactagacctagacctagacttggaagcagaggaggacaacctggcaaccaccacactgggctccgccctcagcctaccagttggaacacttaatcggccacgtgggagccagagccttttaagtccatcatctggatacatgcccatgaaccagggtaatcttggggagtcttgccaggagtctgcagtttctgggagcagtgaacggtgcccccgtccagtctctctacacccaatgccacggggatgcctggcatcagagtcatcagaggggcatgtaacaggctctgaggctgagctccaggagaaagtgtcaatgtgtaggagccggagcaggagccggagcccacggccacgcggagatagcgcctaccattcccagcgccacagtctgctgactcctgttaccccactctccccacccgggttagaggaagaggatgtcaacggttatgtcatgccagatacacacctcaaaggtactccctcctcccgggaaggcaccctttcttcagtgggtctcagttctgtcctgggtactgaagaagaagatgaagatgaggagtatgaatacatgaaccggaggagaaggcacagtccacctcatccccctaggccaagttcccttgaggagctgggttatgagtacatggatgtggggtcagacctcagtgcctctctgggcagcacacagagttgcccactccaccctgtacccatcatgcccactgcaggcacaactccagatgaagactatgaatatatgaatcggcaacgagatggaggtggtcctgggggtgattatgcagccatgggggcctgcccagcatctgagcaagggtatgaagagatgagagcttttcaggggcctggacatcaggccccccatgtccattatgcccgcctaaaaactctacgtagcttagaggctacagactctgcctttgataaccctgattactggcatagcaggcttttccccaaggctaatgcccagagaacgtaa

SEQ ID NO: 420 - DNA, 4029 bp, Homo sapiens
atgagggcgaacgacgctctgcaggtgctgggcttgcttttcagcctggcccggggctccgaggtgggcaactctcaggcagtgtgtcctgggactctgaatggcctgagtgtgaccggcgatgctgagaaccaataccagacactgtacaagctctacgagaggtgtgaggtggtgatggggaaccttgagattgtgctcacgggacacaatgccgacctctccttcctgcagtggattcgagaagtgacaggctatgtcctcgtggccatgaatgaattctctactctaccattgcccaacctccgcgtggtgcgagggacccaggtctacgatgggaagtttgccatcttcgtcatgttgaactataacaccaactccagccacgctctgcgccagctccgcttgactcagctcaccgagattctgtcagggggtgtttatattgagaagaacgataagctttgtcacatggacacaattgactggagggacatcgtgagggaccgagatgctgagatagtggtgaaggacaatggcagaagctgtcccccctgtcatgaggtttgcaaggggcgatgctggggtcctggatcagaagactgccagacattgaccaagaccatctgtgctcctcagtgtaatggtcactgctttgggcccaaccccaaccagtgctgccatgatgagtgtgccgggggctgctcaggccctcaggacacagactgctttgcctgccggcacttcaatgacagtggagcctgtgtacctcgctgtccacagcctcttgtctacaacaagctaactttccagctggaacccaatccccacaccaagtatcagtatggaggagtttgtgtagccagctgtccccataactttgtggtggatcaaacatcctgtgtcagggcctgtcctcctgacaagatggaagtagataaaaatgggctcaagatgtgtgagccttgtgggggactatgtcccaaagcctgtgagggaacaggctctgggagccgcttccagactgtggactcgagcaacattgatggatttgtgaactgcaccaagatcctgggcaacctggactttctgatcaccggcctcaatggagacccctggcacaagatccctgccctggacccagagaagctcaatgtcttccggacagtacgggagatcacaggttacctgaacatccagtcctggccgccccacatgcacaacttcagtgttttttccaatttgacaaccattggaggcagaagcctctacaaccggggcttctcattgttgatcatgaagaacttgaatgtcacatctctgggcttccgatccctgaaggaaattagtgctgggcgtatctatataagtgccaataggcagctctgctaccaccactctttgaactggaccaaggtgcttcgggggcctacggaagagcgactagacatcaagcataatcggccgcgcagagactgcgtggcagagggcaaagtgtgtgacccactgtgctcctctgggggatgctggggcccaggccctggtcagtgcttgtcctgtcgaaattatagccgaggaggtgtctgtgtgacccactgcaactttctgaatggggagcctcgagaatttgcccatgaggccgaatgcttctcctgccacccggaatgccaacccatggagggcactgccacatgcaatggctcgggctctgatacttgtgctcaatgtgcccattttcgagatgggccccactgtgtgagcagctgcccccatggagtcctaggtgccaagggcccaatctacaagtacccagatgttcagaatgaatgtcggccctgccatgagaactgcacccaggggtgtaaaggaccagagcttcaagactgtttaggacaaacactggtgctgatcggcaaaacccatctgacaatggctttgacagtgatagcaggattggtagtgattttcatgatgctgggcggcacttttctctactggcgtgggcgccggattcagaataaaagggctatgaggcgatacttggaacggggtgagagcatagagcctctggaccccagtgagaaggctaacaaagtcttggccagaatcttcaaagagacagagctaaggaagcttaaagtgcttggctcgggtgtctttggaactgtgcacaaaggagtgtggatccctgagggtgaatcaatcaagattccagtctgcattaaagtcattgaggacaagagtggacggcagagttttcaagctgtgacagatcatatgctggccattggcagcctggaccatgcccacattgtaaggctgctgggactatgcccagggtcatctctgcagcttgtcactcaatatttgcctctgggttctctgctggatcatgtgagacaacaccggggggcactggggccacagctgctgctcaactggggagtacaaattgccaagggaatgtactaccttgaggaacatggtatggtgcatagaaacctggctgcccgaaacgtgctactcaagtcacccagtcaggttcaggtggcagattttggtgtggctgacctgctgcctcctgatgataagcagctgctatacagtgaggccaagactccaattaagtggatggcccttgagagtatccactttgggaaatacacacaccagagtgatgtctggagctatggtgtgacagtttgggagttgatgaccttcggggcagagccctatgcagggctacgattggctgaagtaccagacctgctagagaagggggagcggttggcacagccccagatctgcacaattgatgtctacatggtgatggtcaagtgttggatgattgatgagaacattcgcccaacctttaaagaactagccaatgagttcaccaggatggcccgagacccaccacggtatctggtcataaagagagagagtgggcctggaatagcccctgggccagagccccatggtctgacaaacaagaagctagaggaagtagagctggagccagaactagacctagacctagacttggaagcagaggaggacaacctggcaaccaccacactgggctccgccctcagcctaccagttggaacacttaatcggccacgtgggagccagagccttttaagtccatcatctggatacatgcccatgaaccagggtaatcttggggagtcttgccaggagtctgcagtttctgggagcagtgaatggtgcccccgtccagtctctctacacccaatgccacggggatgcctggcatcagagtcatcagaggggcatgtaacaggctctgaggctgagctccaggagaaagtgtcaatgtgtaggagccggagcaggagccggagcccacggccacgcggagatagcgcctaccattcccagcgccacagtctgctgactcctgttaccccactctccccacccgggttagaggaagaggatgtcaacggttatgtcatgccagatacacacctcaaaggtactccctcctcccgggaaggcaccctttcttcagtgggtctcagttctgtcctgggtactgaagaagaagatgaagatgaggagtatgaatacatgaaccggaggagaaggcacagtccacctcatccccctaggccaagttcccttgaggagctgggttatgagtacatggatgtggggtcagacctcagtgcctctctgggcagcacacagagttgcccactccaccctgtacccatcatgcccactgcaggcacaactccagatgaagactatgaatatatgaatcggcaacgagatggaggtggtcctgggggtgattatgcagccatgggggcctgcccagcatctgagcaagggtatgaagagatgagagcttttcaggggcctggacatcaggccccccatgtccattatgcccgcctaaaaactctacgtagcttagaggctacagactctgcctttgataaccctgattactggcatagcaggcttttccccaaggctaatgcccagagaacgtaa

SEQ ID NO: 421 - DNA, 4029 bp, Homo sapiens
atgagggcgaacgacgctctgcaggtgctgggcttgcttttcagcctggcccggggctccgaggtgggcaactctcaggcagtgtgtcctgggactctgaatggcctgagtgtgaccggcgatgctgagaaccaataccagacactgtacaagctctacgagaggtgtgaggtggtgatggggaaccttgagattgtgctcacgggacacaatgccgacctctccttcctgcagtggattcgagaagtgacaggctatgtcctcgtggccatgaatgaattctctactctaccattgcccaacctccgcgtggtgcgagggacccaggtctacgatgggaagtttgccatcttcgtcatgttgaactataacaccaactccagccacgctctgcgccagctccgcttgactcagctcaccgagattctgtcagggggtgtttatattgagaagaacgataagctttgtcacatggacacaattgactggagggacatcgtgagggaccgagatgctgagatagtggtgaaggacaatggcagaagctgtcccccctgtcatgaggtttgcaaggggcgatgctggggtcctggatcagaagactgccagacattgaccaagaccatctgtgctcctcagtgtaatggtcactgctttgggcccaaccccaaccagtgctgccatgatgagtgtgccgggggctgctcaggccctcaggacacagactgctttgcctgccggcacttcaatgacagtggagcctgtgtacctcgctgtccacagcctcttgtctacaacaagctaactttccagctggaacccaatccccacaccaagtatcagtatggaggagtttgtgtagccagctgtccccataactttgtggtggatcaaacatcctgtgtcagggcctgtcctcctgacaagatggaagtagataaaaatgggctcaagatgtgtgagccttgtgggggactatgtcccaaagcctgtgagggaacaggctctgggagccgcttccagactgtggactcgagcaacattgatggatttgtgaactgcaccaagatcctgggcaacctggactttctgatcaccggcctcaatggagacccctggcacaagatccctgccctggacccagagaagctcaatgtcttccggacagtacgggagatcacaggttacctgaacatccagtcctggccgccccacatgcacaacttcagtgttttttccaatttgacaaccattggaggcagaagcctctacaaccggggcttctcattgttgatcatgaagaacttgaatgtcacatctctgggcttccgatccctgaaggaaattagtgctgggcgtatctatataagtgccaataggcagctctgctaccaccactctttgaactggaccaaggtgcttcgggggcctacggaagagcgactagacatcaagcataatcggccgcgcagagactgcgtggcagagggcaaagtgtgtgacccactgtgctcctctgggggatgctggggcccaggccctggtcagtgcttgtcctgtcgaaattatagccgaggaggtgtctgtgtgacccactgcaactttctgaatggggagcctcgagaatttgcccatgaggccgaatgcttctcctgccacccggaatgccaacccatggagggcactgccacatgcaatggctcgggctctgatacttgtgctcaatgtgcccattttcgagatgggccccactgtgtgagcagctgcccccatggagtcctaggtgccaagggcccaatctacaagtacccagatgttcagaatgaatgtcggccctgccatgagaactgcacccaggggtgtaaaggaccagagcttcaagactgtttaggacaaacactggtgctgatcggcaaaacccatctgacaatggctttgacagtgatagcaggattggtagtgattttcatgatgctgggcggcacttttctctactggcgtgggcgccggattcagaataaaagggctatgaggcgatacttggaacggggtgagagcatagagcctctggaccccagtgagaaggctaacaaagtcttggccagaatcttcaaagagacagagctaaggaagcttaaagtgcttggctcgggtgtctttggaactgtgcacaaaggagtgtggatccctgagggtgaatcaatcaagattccagtctgcattaaagtcattgaggacaagagtggacggcagagttttcaagctgtgacagatcatatgctggccattggcagcctggaccatgcccacattgtaaggctgctgggactatgcccagggtcatctctgcagcttgtcactcaatatttgcctctgggttctctgctggatcatgtgagacaacaccggggggcactggggccacagctgctgctcaactggggagtacaaattgccaagggaatgtactaccttgaggaacatggtatggtgcatagaaacctggctgcccgaaacgtgctactcaagtcacccagtcaggttcaggtggcagattttggtgtggctgacctgctgcctcctgatgataagcagctgctatacagtgaggccaagactccaattaagtggatggcccttgagagtatccactttgggaaatacacacaccagagtgatgtctggagctatggtgtgacagtttgggagttgatgaccttcggggcagagccctatgcagggctacgattggctgaagtaccagacctgctagagaagggggagcggttggcacagccccagatctgcacaattgatgtctacatggtgatggtcaagtgttggatgattgatgagaacattcgcccaacctttaaagaactagccaatgagttcaccaggatggcccgagacccaccacggtatctggtcataaagagagagagtgggcctggaatagcccctgggccagagccccatggtctgacaaacaagaagctagaggaagtagagctggagccagaactagacctagacctagacttggaagcagaggaggacaacctggcaaccaccacactgggctccgccctcagcctaccagttggaacacttaatcggccacgtgggagccagagccttttaagtccatcatctggatacatgcccatgaaccagggtaatcttggggagtcttgccaggagtctgcagtttctgggagcagtgaacggtgcccccgtccagtctctctacacccaatgccatggggatgcctggcatcagagtcatcagaggggcatgtaacaggctctgaggctgagctccaggagaaagtgtcaatgtgtaggagccggagcaggagccggagcccacggccacgcggagatagcgcctaccattcccagcgccacagtctgctgactcctgttaccccactctccccacccgggttagaggaagaggatgtcaacggttatgtcatgccagatacacacctcaaaggtactccctcctcccgggaaggcaccctttcttcagtgggtctcagttctgtcctgggtactgaagaagaagatgaagatgaggagtatgaatacatgaaccggaggagaaggcacagtccacctcatccccctaggccaagttcccttgaggagctgggttatgagtacatggatgtggggtcagacctcagtgcctctctgggcagcacacagagttgcccactccaccctgtacccatcatgcccactgcaggcacaactccagatgaagactatgaatatatgaatcggcaacgagatggaggtggtcctgggggtgattatgcagccatgggggcctgcccagcatctgagcaagggtatgaagagatgagagcttttcaggggcctggacatcaggccccccatgtccattatgcccgcctaaaaactctacgtagcttagaggctacagactctgcctttgataaccctgattactggcatagcaggcttttccccaaggctaatgcccagagaacgtaa

SEQ ID NO: 422 - DNA, 4029 bp, Homo sapiens
atgagggcgaacgacgctctgcaggtgctgggcttgcttttcagcctggcccggggctccgaggtgggcaactctcaggcagtgtgtcctgggactctgaatggcctgagtgtgaccggcgatgctgagaaccaataccagacactgtacaagctctacgagaggtgtgaggtggtgatggggaaccttgagattgtgctcacgggacacaatgccgacctctccttcctgcagtggattcgagaagtgacaggctatgtcctcgtggccatgaatgaattctctactctaccattgcccaacctccgcgtggtgcgagggacccaggtctacgatgggaagtttgccatcttcgtcatgttgaactataacaccaactccagccacgctctgcgccagctccgcttgactcagctcaccgagattctgtcagggggtgtttatattgagaagaacgataagctttgtcacatggacacaattgactggagggacatcgtgagggaccgagatgctgagatagtggtgaaggacaatggcagaagctgtcccccctgtcatgaggtttgcaaggggcgatgctggggtcctggatcagaagactgccagacattgaccaagaccatctgtgctcctcagtgtaatggtcactgctttgggcccaaccccaaccagtgctgccatgatgagtgtgccgggggctgctcaggccctcaggacacagactgctttgcctgccggcacttcaatgacagtggagcctgtgtacctcgctgtccacagcctcttgtctacaacaagctaactttccagctggaacccaatccccacaccaagtatcagtatggaggagtttgtgtagccagctgtccccataactttgtggtggatcaaacatcctgtgtcagggcctgtcctcctgacaagatggaagtagataaaaatgggctcaagatgtgtgagccttgtgggggactatgtcccaaagcctgtgagggaacaggctctgggagccgcttccagactgtggactcgagcaacattgatggatttgtgaactgcaccaagatcctgggcaacctggactttctgatcaccggcctcaatggagacccctggcacaagatccctgccctggacccagagaagctcaatgtcttccggacagtacgggagatcacaggttacctgaacatccagtcctggccgccccacatgcacaacttcagtgttttttccaatttgacaaccattggaggcagaagcctctacaaccggggcttctcattgttgatcatgaagaacttgaatgtcacatctctgggcttccgatccctgaaggaaattagtgctgggcgtatctatataagtgccaataggcagctctgctaccaccactctttgaactggaccaaggtgcttcgggggcctacggaagagcgactagacatcaagcataatcggccgcgcagagactgcgtggcagagggcaaagtgtgtgacccactgtgctcctctgggggatgctggggcccaggccctggtcagtgcttgtcctgtcgaaattatagccgaggaggtgtctgtgtgacccactgcaactttctgaatggggagcctcgagaatttgcccatgaggccgaatgcttctcctgccacccggaatgccaacccatggagggcactgccacatgcaatggctcgggctctgatacttgtgctcaatgtgcccattttcgagatgggccccactgtgtgagcagctgcccccatggagtcctaggtgccaagggcccaatctacaagtacccagatgttcagaatgaatgtcggccctgccatgagaactgcacccaggggtgtaaaggaccagagcttcaagactgtttaggacaaacactggtgctgatcggcaaaacccatctgacaatggctttgacagtgatagcaggattggtagtgattttcatgatgctgggcggcacttttctctactggcgtgggcgccggattcagaataaaagggctatgaggcgatacttggaacggggtgagagcatagagcctctggaccccagtgagaaggctaacaaagtcttggccagaatcttcaaagagacagagctaaggaagcttaaagtgcttggctcgggtgtctttggaactgtgcacaaaggagtgtggatccctgagggtgaatcaatcaagattccagtctgcattaaagtcattgaggacaagagtggacggcagagttttcaagctgtgacagatcatatgctggccattggcagcctggaccatgcccacattgtaaggctgctgggactatgcccagggtcatctctgcagcttgtcactcaatatttgcctctgggttctctgctggatcatgtgagacaacaccggggggcactggggccacagctgctgctcaactggggagtacaaattgccaagggaatgtactaccttgaggaacatggtatggtgcatagaaacctggctgcccgaaacgtgctactcaagtcacccagtcaggttcaggtggcagattttggtgtggctgacctgctgcctcctgatgataagcagctgctatacagtgaggccaagactccaattaagtggatggcccttgagagtatccactttgggaaatacacacaccagagtgatgtctggagctatggtgtgacagtttgggagttgatgaccttcggggcagagccctatgcagggctacgattggctgaagtaccagacctgctagagaagggggagcggttggcacagccccagatctgcacaattgatgtctacatggtgatggtcaagtgttggatgattgatgagaacattcgcccaacctttaaagaactagccaatgagttcaccaggatggcccgagacccaccacggtatctggtcataaagagagagagtgggcctggaatagcccctgggccagagccccatggtctgacaaacaagaagctagaggaagtagagctggagccagaactagacctagacctagacttggaagcagaggaggacaacctggcaaccaccacactgggctccgccctcagcctaccagttggaacacttaatcggccacgtgggagccagagccttttaagtccatcatctggatacatgcccatgaaccagggtaatcttggggagtcttgccaggagtctgcagtttctgggagcagtgaacggtgcccccgtccagtctctctacacccaatgccacggggatgcctggcatcagagtcatcagaggggcatgtaacaggctctgaggctgagctccaggagaaagtgtcaatgtgtaggagccggagcaggagccggagcccacggccacgcggagatagcgcctaccattcccagcgccacagtctgctgactcatgttaccccactctccccacccgggttagaggaagaggatgtcaacggttatgtcatgccagatacacacctcaaaggtactccctcctcccgggaaggcaccctttcttcagtgggtctcagttctgtcctgggtactgaagaagaagatgaagatgaggagtatgaatacatgaaccggaggagaaggcacagtccacctcatccccctaggccaagttcccttgaggagctgggttatgagtacatggatgtggggtcagacctcagtgcctctctgggcagcacacagagttgcccactccaccctgtacccatcatgcccactgcaggcacaactccagatgaagactatgaatatatgaatcggcaacgagatggaggtggtcctgggggtgattatgcagccatgggggcctgcccagcatctgagcaagggtatgaagagatgagagcttttcaggggcctggacatcaggccccccatgtccattatgcccgcctaaaaactctacgtagcttagaggctacagactctgcctttgataaccctgattactggcatagcaggcttttccccaaggctaatgcccagagaacgtaa

SEQ ID NO: 423 - DNA, 4029 bp, Homo sapiens
atgagggcgaacgacgctctgcaggtgctgggcttgcttttcagcctggcccggggctccgaggtgggcaactctcaggcagtgtgtcctgggactctgaatggcctgagtgtgaccggcgatgctgagaaccaataccagacactgtacaagctctacgagaggtgtgaggtggtgatggggaaccttgagattgtgctcacgggacacaatgccgacctctccttcctgcagtggattcgagaagtgacaggctatgtcctcgtggccatgaatgaattctctactctaccattgcccaacctccgcgtggtgcgagggacccaggtctacgatgggaagtttgccatcttcgtcatgttgaactataacaccaactccagccacgctctgcgccagctccgcttgactcagctcaccgagattctgtcagggggtgtttatattgagaagaacgataagctttgtcacatggacacaattgactggagggacatcgtgagggaccgagatgctgagatagtggtgaaggacaatggcagaagctgtcccccctgtcatgaggtttgcaaggggcgatgctggggtcctggatcagaagactgccagacattgaccaagaccatctgtgctcctcagtgtaatggtcactgctttgggcccaaccccaaccagtgctgccatgatgagtgtgccgggggctgctcaggccctcaggacacagactgctttgcctgccggcacttcaatgacagtggagcctgtgtacctcgctgtccacagcctcttgtctacaacaagctaactttccagctggaacccaatccccacaccaagtatcagtatggaggagtttgtgtagccagctgtccccataactttgtggtggatcaaacatcctgtgtcagggcctgtcctcctgacaagatggaagtagataaaaatgggctcaagatgtgtgagccttgtgggggactatgtcccaaagcctgtgagggaacaggctctgggagccgcttccagactgtggactcgagcaacattgatggatttgtgaactgcaccaagatcctgggcaacctggactttctgatcaccggcctcaatggagacccctggcacaagatccctgccctggacccagagaagctcaatgtcttccggacagtacgggagatcacaggttacctgaacatccagtcctggccgccccacatgcacaacttcagtgttttttccaatttgacaaccattggaggcagaagcctctacaaccggggcttctcattgttgatcatgaagaacttgaatgtcacatctctgggcttccgatccctgaaggaaattagtgctgggcgtatctatataagtgccaataggcagctctgctaccaccactctttgaactggaccaaggtgcttcgggggcctacggaagagcgactagacatcaagcataatcggccgcgcagagactgcgtggcagagggcaaagtgtgtgacccactgtgctcctctgggggatgctggggcccaggccctggtcagtgcttgtcctgtcgaaattatagccgaggaggtgtctgtgtgacccactgcaactttctgaatggggagcctcgagaatttgcccatgaggccgaatgcttctcctgccacccggaatgccaacccatggagggcactgccacatgcaatggctcgggctctgatacttgtgctcaatgtgcccattttcgagatgggccccactgtgtgagcagctgcccccatggagtcctaggtgccaagggcccaatctacaagtacccagatgttcagaatgaatgtcggccctgccatgagaactgcacccaggggtgtaaaggaccagagcttcaagactgtttaggacaaacactggtgctgatcggcaaaacccatctgacaatggctttgacagtgatagcaggattggtagtgattttcatgatgctgggcggcacttttctctactggcgtgggcgccggattcagaataaaagggctatgaggcgatacttggaacggggtgagagcatagagcctctggaccccagtgagaaggctaacaaagtcttggccagaatcttcaaagagacagagctaaggaagcttaaagtgcttggctcgggtgtctttggaactgtgcacaaaggagtgtggatccctgagggtgaatcaatcaagattccagtctgcattaaagtcattgaggacaagagtggacggcagagttttcaagctgtgacagatcatatgctggccattggcagcctggaccatgcccacattgtaaggctgctgggactatgcccagggtcatctctgcagcttgtcactcaatatttgcctctgggttctctgctggatcatgtgagacaacaccggggggcactggggccacagctgctgctcaactggggagtacaaattgccaagggaatgtactaccttgaggaacatggtatggtgcatagaaacctggctgcccgaaacgtgctactcaagtcacccagtcaggttcaggtggcagattttggtgtggctgacctgctgcctcctgatgataagcagctgctatacagtgaggccaagactccaattaagtggatggcccttgagagtatccactttgggaaatacacacaccagagtgatgtctggagctatggtgtgacagtttgggagttgatgaccttcggggcagagccctatgcagggctacgattggctgaagtaccagacctgctagagaagggggagcggttggcacagccccagatctgcacaattgatgtctacatggtgatggtcaagtgttggatgattgatgagaacattcgcccaacctttaaagaactagccaatgagttcaccaggatggcccgagacccaccacggtatctggtcataaagagagagagtgggcctggaatagcccctgggccagagccccatggtctgacaaacaagaagctagaggaagtagagctggagccagaactagacctagacctagacttggaagcagaggaggacaacctggcaaccaccacactgggctccgccctcagcctaccagttggaacacttaatcggccacgtgggagccagagccttttaagtccatcatctggatacatgcccatgaaccagggtaatcttggggagtcttgccaggagtctgcagtttctgggagcagtgaacggtgcccccgtccagtctctctacacccaatgccacggggatgcctggcatcagagtcatcagaggggcatgtaacaggctctgaggctgagctccaggagaaagtgtcaatgtgtaggagccggagcaggagccggagcccacggccacgcggagatagcgcctaccattcccagcgccacagtctgctgactcctgttaccccactctccccacccgggttagaggaagaggatgtcaacggttatgtcatgccagatacacacctcaaaggtactccctcctcccgggaaggcaccatttcttcagtgggtctcagttctgtcctgggtactgaagaagaagatgaagatgaggagtatgaatacatgaaccggaggagaaggcacagtccacctcatccccctaggccaagttcccttgaggagctgggttatgagtacatggatgtggggtcagacctcagtgcctctctgggcagcacacagagttgcccactccaccctgtacccatcatgcccactgcaggcacaactccagatgaagactatgaatatatgaatcggcaacgagatggaggtggtcctgggggtgattatgcagccatgggggcctgcccagcatctgagcaagggtatgaagagatgagagcttttcaggggcctggacatcaggccccccatgtccattatgcccgcctaaaaactctacgtagcttagaggctacagactctgcctttgataaccctgattactggcatagcaggcttttccccaaggctaatgcccagagaacgtaa

SEQ ID NO: 424 - DNA, 3927 bp, Homo sapiens
atgaagccggcgacaggactttgggtctgggtgagccttctcgtggcggcggggaccgtccagcccagcgattctcagtcagtgtgtgcaggaacggagaataaactgagctctctctctgacctggaacagcagtaccgagccttgcgcaagtactatgaaaactgtgaggttgtcatgggcaacctggagataaccagcattgagcacaaccgggacctctccttcctgcggtctgttcgagaagtcacaggctacgtgttagtggctcttaatcagtttcgttacctgcctctggagaatttacgcattattcgtgggacaaaactttatgaggatcgatatgccttggcaatatttttaaactacagaaaagatggaaactttggacttcaagaacttggattaaagaacttgacagaaatcctaaatggtggagtctatgtagaccagaacaaattcctttgttatgcagacaccattcattggcaagatattgttcggaacccatggccttccaacttgactcttgtgtcaacaaatggtagttcaggatgtggacgttgccataagtcctgtactggccgttgctggggacccacagaaaatcattgccagactttgacaaggacggtgtgtgcagaacaatgtgacggcagatgctacggaccttacgtcagtgactgctgccatcgagaatgtgctggaggctgctcaggacctaaggacacagactgctttgcctgcatgaatttcaatgacagtggagcatgtgttactcagtgtccccaaacctttgtctacaatccaaccacctttcaactggagcacaatttcaatgcaaagtacacatatggagcattctgtgtcaagaaatgtccacataactttgtggtagattccagttcttgtgtgcgtgcctgccctagttccaagatggaagtagaagaaaatgggattaaaatgtgtaaaccttgcactgacatttgcccaaaagcttgtgatggcattggcacaggatcattgatgtcagctcagactgtggattccagtaacattgacaaattcataaactgtaccaagatcaatgggaatttgatctttctagtcactggtattcatggggacccttacaatgcaattgaagccatagacccagagaaactgaacgtctttcggacagtcagagagataacaggtttcctgaacatacagtcatggccaccaaacatgactgacttcagtgttttttctaacctggtgaccattggtggaagagtactctatagtggcctgtccttgcttatcctcaagcaacagggcatcacctctctacagttccagtccctgaaggaaatcagcgcaggaaacatctatattactgacaacagcaacctgtgttattatcataccattaactggacaacactcttcagcacaatcaaccagagaatagtaatccgggacaacagaaaagctgaaaattgtactgctgaaggaatggtgtgcaaccatctgtgttccagtgatggctgttggggacctgggccagaccaatgtctgtcgtgtcgccgcttcagtagaggaaggatctgcatagagtcttgtaacctctatgatggtgaatttcgggagtttgagaatggctccatctgtgtggagtgtgacccccagtgtgagaagatggaagatggcctcctcacatgccatggaccgggtcctgacaactgtacaaagtgctctcattttaaagatggcccaaactgtgtggaaaaatgtccagatggcttacagggggcaaacagtttcattttcaagtatgctgatccagatcgggagtgccacccatgccatccaaactgcacccaagggtgtaacggtcccactagtcatgactgcatttactacccatggacgggccattccactttaccacaacatgctagaactcccctgattgcagctggagtaattggtgggctcttcattctggtcattgtgggtctgacatttgctgtttatgttagaaggaagagcatcaaaaagaaaagagccttgagaagattcttggaaacagagttggtggaaccattaactcccagtggcacagcacccaatcaagctcaacttcgtattttgaaagaaactgagctgaagagggtaaaagtccttggctcaggtgcttttggaacggtttataaaggtatttgggtacctgaaggagaaactgtgaagattcctgtggctattaagattgttaatgagacaactggtcccaaggcaaatgtggagttcatggatgaagctctgatcatggcaagtatggatcatccacacctagtccggttgctgggtgtgtgtctgagcccaaccatccagctggttactcaacttatgccccatggctgcctgttggagtatgtccacgagcacaaggataacattggatcacaactgctgcttaactggtgtgtccagatagctaagggaatgatgtacctggaagaaagacgactcgttcatcgggatttggcagcccgtaatgtcttagtgaaatctccaaaccatgtgaaaatcacagattttgggctagccagactcttggaaggagatgaaaaagagtacaatgctgatggaggaaagatgccaattaaatggatggctctggagtgtatacattacaggaaattcacccatcagagtgacgtttggagctatggagttactatatgggaactgatgacctttggaggaaaaccctatgatggaattccaacgcgagaaatccctgatttattagagaaaggagaacgtttgcctcagcctcccatctgcactattgacgtttacatggtcatggtcaaatgttggatgattgatgctgacagtagacctaaatttaaggaactggctgctgagttttcaaggatggctcgagaccctcaaagatacctagttattcagggtgatgatcgtatgaagcttcccagtccaaatgacagcaagttctttcagaatctcttggatgaagaggatttggaagatatgatggatgctgaggagtacttggtccctcaggctttcaacatcccacctcccatctatacttccagagcaagaattgactcgaataggagtgaaattggacacagccctcctcctgcctacacccccatgtcaggaaaccagtttgtataccgagatggaggttttgctgctgaacaaggagtgtctgtgccctacagagccccaactagcacaattccagaagctcctgtggcacagggtgctactgctgagatttttgatgactcctgctgtaatggcaccctacgcaagccagtggcaccccatgtccaagaggacagtagcacccagaggtacagtgctgaccccaccgtgtttgccccagaacggagcccacgaggagagctggatgaggaaggttacatgactcctatgcgagacaaacccaaacaagaatacctgaatccagtggaggagaacccttttgtttctcggagaaaaaatggagaccttcaagcattggataatcccgaatatcacaatgcatccaatggtccacccaaggccgaggatgagtatgtgaatgagccactgtacctcaacacctttgccaacaccttgggaaaagctgagtacctgaagaacaacatactgtcaatgccagagaaggccaagaaagcgtttgacaaccctgactactggaaccacagcctgccacctcggagcacccttcagcacccagactacctgcaggagtacagcacaaaatatttttataaacagaatgggcggatccggcctattgtggcagagaatcctgaatacctctctgagttctccctgaagccaggcactgtgctgccgcctccaccttacagacaccggaatactgtggtgtaa

SEQ ID NO: 425 - DNA, 3927 bp, Homo sapiens
atgaagccggcgacaggactttgggtctgggtgagccttctcgtggcggcggggaccgtccagcccagcgattctcagtcagtgtgtgcaggaacggagaataaactgagctctctctctgacctggaacagcagtaccgagccttgcgcaagtactatgaaaactgtgaggttgtcatgggcaacctggagataaccagcattgagcacaaccgggacctctccttcctgcggtctgttcgagaagtcacaggctacgtgttagtggctcttaatcagtttcgttacctgcctctggagaatttacgcattattcgtgggacaaaactttatgaggatcgatatgccttggcaatatttttaaactacagaaaagatggaaactttggacttcaagaacttggattaaagaacttgacagaaatcctaaatggtggagtctatgtagaccagaacaaattcctttgttatgcagacaccattcattggcaagatattgttcggaacccatggccttccaacttgactcttgtgtcaacaaatggtagttcaggatgtggacgttgccataagtcctgtactggccgttgctggggacccacagaaaatcattgccagactttgacaaggacggtgtgtgcagaacaatgtgacggcagatgctacggaccttacgtcagtgactgctgccatcgagaatgtgctggaggctgctcaggacctaaggacacagactgctttgcctgcatgaatttcaatgacagtggagcatgtgttactcagtgtccccaaacctttgtctacaatccaaccacctttcaactggagcacaatttcaatgcaaagtacacatatggagcattctgtgtcaagaaatgtccacataactttgtggtagattccagttcttgtgtgcgtgcctgccctagttccaagatggaagtagaagaaaatgggattaaaatgtgtaaaccttgcactgacatttgcccaaaagcttgtgatggcattggcacaggatcattgatgtcagctcagactgtggattccagtaacattgacaaattcataaactgtaccaagatcaatgggaatttgatctttctagtcactggtattcatggggacccttacaatgcaattgaagccatagacccagagaaactgaacgtctttcggacagtcagagagataacaggtttcctgaacatacagtcatggccaccaaacatgactgacttcagtgttttttctaacctggtgaccattggtggaagagtactctatagtggcctgtccttgcttatcctcaagcaacagggcatcacctctctacagttccagtccctgaaggaaatcagcgcaggaaacatctatattactgacaacagcaacctgtgttattatcataccattaactggacaacactcttcagcacaatcaaccagagaatagtaatccgggacaacagaaaagctgaaaattgtactgctgaaggaatggtgtgcaaccatctgtgttccagtgatggctgttggggacctgggccagaccaatgtctgtcgtgtcgccgcttcagtagaggaaggatctgcatagagtcttgtaacctctatgatggtgaatttcgggagtttgagaatggctccatctgtgtggagtgtgacccccagtgtgagaagatggaagatggcctcctcacatgccatggaccgggtcctgacaactgtacaaagtgctctcattttaaagatggcccaaactgtgtggaaaaatgtccagatggcttacagggggcaaacagtttcattttcaagtatgctgatccagatcgggagtgccacccatgccatccaaactgcacccaagggtgtaacggtcccactagtcatgactgcatttactacccatggacgggccattccactttaccacaacatgctagaactcccctgattgcagctggagtaattggtgggctcttcattctggtcattgtgggtctgacatttgctgtttatgttagaaggaagagcatcaaaaagaaaagagccttgagaagattcttggaaacagagttggtggaaccattaactcccagtggcacagcacccaatcaagctcaacttcgtattttgaaagaaactgagctgaagagggtaaaagtccttggctcaggtgcttttggaacggtttataaaggtatttgggtacctgaaggagaaactgtgaagattcctgtggctattaagattcttaatgagacaactggtcccaaggcaaatgtggagttcatggatgaagctctgatcatggcaagtatggatcatccacacctagtccggttgctgggtgtgtgtctgagcccaaccatccagctggttactcaacttatgccccatggctgcctgttggagtatgtccacgagcacaaggataacattggatcacaactgctgcttaactggtgtgtccagatagctaagggaatgatgtacctggaagaaagacgactcgttcatcgggatttggcagcccgtaatgtcttagtgaaatctccaaaccatgtgaaaatcacagattttgggctagccagactcttggaaggagatgaaaaagagtacaatgctgatggaggaaagatgccaattaaatggatggctctggagtgtatacattacaggaaattcacccatcagagtgacgtttggagctatggagttactatatgggaactgatgacctttggaggaaaaccctatgatggaattccaacgcgagaaatccctgatttattagagaaaagagaacgtttgcctcagcctcccatctgcactattgacgtttacatggtcatggtcaaatgttggatgattgatgctgacagtagacctaaatttaaggaactggctgctgagttttcaaggatggctcgagaccctcaaagatacctagttattcagggtgatgatcgtatgaagcttcccagtccaaatgacagcaagttctttcagaatctcttggatgaagaggatttggaagatatgatggatgctgaggagtacttggtccctcaggctttcaacatcccacctcccatctatacttccagagcaagaattgactcgaataggagtgaaattggacacagccctcctcctgcctacacccccatgtcaggaaaccagtttgtataccgagatggaggttttgctgctgaacaaggagtgtctgtgccctacagagccccaactagcacaattccagaagctcctgtggcacagggtgctactgctgagatttttgatgactcctgctgtaatggcaccctacgcaagccagtggcaccccatgtccaagaggacagtagcacccagaggtacagtgctgaccccaccgtgtttgccccagaacggagcccacgaggagagctggatgaggaaggttacatgactcctatgcgagacaaacccaaacaagaatacctgaatccagtggaggagaacccttttgtttctcggagaaaaaatggagaccttcaagcattggataatcccgaatatcacaatgcatccaatggtccacccaaggccgaggatgagtatgtgaatgagccactgtacctcaacacctttgccaacaccttgggaaaagctgagtacctgaagaacaacatactgtcaatgccagagaaggccaagaaagcgtttgacaaccctgactactggaaccacagcctgccacctcggagcacccttcagcacccagactacctgcaggagtacagcacaaaatatttttataaacagaatgggcggatccggcctattgtggcagagaatcctgaatacctctctgagttctccctgaagccaggcactgtgctgccgcctccaccttacagacaccggaatactgtggtgtaa

SEQ ID NO: 426 - DNA, 4104 bp, Homo sapiens
atgaagtctggctccggaggagggtccccgacctcgctgtgggggctcctgtttctctccgccgcgctctcgctctggccgacgagtggagaaatctgcgggccaggcatcgacatccgcaacgactatcagcagctgaagcgcctggagaactgcacggtgatcgagggctacctccacatcctgctcatctccaaggccgaggactaccgcagctaccgcttccccaagctcacggtcattaccgagtacttgctgctgttccgagtggctggcctcgagagcctcggagacctcttccccaacctcatggtcatccgcggctggaaactcttctacaactacgccctggtcatcttcgagatgaccaatctcaaggatattgggctttacaacctgaggaacattactcggggggccatcaggattgagaaaaatgctgacctctgttacctctccactgtggactggtccctgatcctggatgcggtgtccaataactacattgtggggaataagcccccaaaggaatgtggggacctgtgtccagggaccatggaggagaagccgatgtgtgagaagaccaccatcaacaatgagtacaactaccgctgctggaccacaaaccgctgccagaaaatgtgcccaagcacgtgtgggaagcgggcgtgcaccgagaacaatgagtgctgccaccccgagtgcctgggcagctgcagcgcgcctgacaacgacacggcctgtgtagcttgccgccactactactatgccggtgtctgtgtgcctgcctgcccgcccaacacctacaggtttgagggctggcgctgtgtggaccgtgacttctgcgccaacatcctcagcgccgagagcagcgactccgaggggtttgtgatccacgacggcgagtgcatgcaggagtgcccctcgggcttcatccgcaacggcagccagagcatgtactgcatcccttgtgaaggtccttgcccgaaggtctgtgaggaagaaaagaaaacaaagaccattgattctgttacttctgctcagatgctccaaggatgcaccatcttcaagggcaatttgctcattaacatccgacgggggaataacattgcttcagagctggagaacttcatggggctcatcgaggtggtgacgggctacgtgaagatccgccattctcatgccttggtctccttgtccttcctaaaaaaccttcgcctcatcctaggagaggagcagctagaagggaattactccttctacgtcctcgacaaccagaacttgcagcaactgtgggactgggaccaccgcaacctgaccatcaaagcagggaaaatgtactttgctttcaatcccaaattatgtgtttccgaaatttaccgcatggaggaagtgacggggactaaagggcgccaaagcaaaggggacataaacaccaggaacaacggggagagagcctcctgtgaaagtgacgtcctgcatttcacctccaccaccacgtcgaagaatcgcatcatcataacctggcaccggtaccggccccctgactacagggatctcatcagcttcaccgtttactacaaggaagcaccctttaagaatgtcacagagtatgatgggcaggatgcctgcggctccaacagctggaacatggtggacgtggacctcccgcccaacaaggacgtggagcccggcatcttactacatgggctgaagccctggactcagtacgccgtttacgtcaaggctgtgaccctcaccatggtggagaacgaccatatccgtggggccaagagtgagatcttgtacattcgcaccaatgcttcagttccttccattcccttggacgttctttcagcatcgaactcctcttctcagttaatcgtgaagtggaaccctccctctctgcccaacggcaacctgagttactacattgtgcgctggcagcggcagcctcaggacggctacctttaccggcacaattactgctccaaagacaaaatccccatcaggaagtatgccgacggcaccatcgacattgaggaggtcacagagaaccccaagactgaggtgtgtggtggggagaaagggccttgctgcgcctgccccaaaactgaagccgagaagcaggccgagaaggaggaggctgaataccgcaaagtctttgagaatttcctgcacaactccatcttcgtgcccagacctgaaaggaagcggagagatgtcatgcaagtggccaacaccaccatgtccagccgaagcaggaacaccacggccgcagacacctacaacatcaccgacccggaagagctggagacagagtaccctttctttgagagcagagtggataacaaggagagaactgtcatttctaaccttcggcctttcacattgtaccgcatcgatatccacagctgcaaccacgaggctgagaagctgggctgcagcgcctccaacttcgtctttgcaaggactatgcccgcagaaggagcagatgacattcctgggccagtgacctgggagccaaggcctgaaaactccatctttttaaagtggccggaacctgagaatcccaatggattgattctaatgtatgaaataaaatacggatcacaagttgaggatcagcgagaatgtgtgtccagacaggaatacaggaagtatggaggggccaagctaaaccggctaaacccggggaactacacagcccggattcaggccacatctctctctgggaatgggtcgtggacagatcctgtgttcttctatgtccaggccaaaacaggatatgaaaacttcatccatctgatcatcgctctgcccgtcgctgtcctgttgatcgtgggagggttggtgattatgctgtacgtcttccatagaaagagaaataacagcaggctggggaatggagtgctgtatgcctctgtgaacccggagtacttcagcgctgctgatgtgtacgttcctgatgagtgggaggtggctcgggagaagatcaccatgagccgggaacttgggcaggggtcgtttgggatggtctatgaaggagttgccaagggtgtggtgaaagatgaacctgaaaccagagtggccattaaaacagtgaacgaggccgcaagcatgcgtgagaggattgagtttctcaacgaagcttctgtgatgaaggagttcaattgtcaccatgtggtgcgattgctgggtgtggtgtcccaaggccagccaacactggtcatcatggaactgatgacacggggcgatctcaaaagttatctccggtctctgaggccagaaatggagaataatccagtcctagcacctccaagcctgagcaagatgattcagatggccggagagattgcagacggcatggcatacctcaacgccaataagttcgtccacagagaccttgctgcccggaattgcatggtagccgaagatttcacagtcaaaatcggagattttggtatgacgcgagatatctatgagacagactattaccggaaaggaggcaaagggctgctgcccgtgcgctggatgtctcctgagtccctcaaggatggagtcttcaccacttactcggacgtctggtccttcggggtcgtcctctgggagatcgccacactggccgagcagccctaccagggcttgtccaacgagcaagtccttcgcttcgtcatggagggcggccttctggacaagccagacaactgtcctgacatgctgtttgaactgatgcgcatgtgctggcagtataaccccaagatgaggccttccttcctggagatcatcagcagcatcaaagaggagatggagcctggcttccgggaggtctccttctactacagcgaggagaacaagctgcccgagccggaggagctggacctggagccagagaacatggagagcgtccccctggacccctcggcctcctcgtcctccctgccactgcccgacagacactcaggacacaaggccgagaacggccccggccctggggtgctggtcctccgcgccagcttcgacgagagacagccttacgcccacatgaacgggggccgcaagaacgagcgggccttgccgctgccccagtcttcgacctgctga

SEQ ID NO: 427 - DNA, 4104 bp, Homo sapiens
atgaagtctggctccggaggagggtccccgacctcgctgtgggggctcctgtttctctccgccgcgctctcgctctggccgacgagtggagaaatctgcgggccaggcatcgacatccgcaacgactatcagcagctgaagcgcctggagaactgcacggtgatcgagggctacctccacatcctgctcatctccaaggccgaggactaccgcagctaccgcttccccaagctcacggtcattaccgagtacttgctgctgttccgagtggctggcctcgagagcctcggagacctcttccccaacctcacggtcatccgcggctggaaactcttctacaactacgccctggtcatcttcgagatgaccaatctcaaggatattgggctttacaacctgaggaacattactcggggggccatcaggattgagaaaaatgctgacctctgttacctctccactgtggactggtccctgatcctggatgcggtgtccaataactacattgtggggaataagcccccaaaggaatgtggggacctgtgtccagggaccatggaggagaagccgatgtgtgagaagaccaccatcaacaatgagcacaactaccgctgctggaccacaaaccgctgccagaaaatgtgcccaagcacgtgtgggaagcgggcgtgcaccgagaacaatgagtgctgccaccccgagtgcctgggcagctgcagcgcgcctgacaacgacacggcctgtgtagcttgccgccactactactatgccggtgtctgtgtgcctgcctgcccgcccaacacctacaggtttgagggctggcgctgtgtggaccgtgacttctgcgccaacatcctcagcgccgagagcagcgactccgaggggtttgtgatccacgacggcgagtgcatgcaggagtgcccctcgggcttcatccgcaacggcagccagagcatgtactgcatcccttgtgaaggtccttgcccgaaggtctgtgaggaagaaaagaaaacaaagaccattgattctgttacttctgctcagatgctccaaggatgcaccatcttcaagggcaatttgctcattaacatccgacgggggaataacattgcttcagagctggagaacttcatggggctcatcgaggtggtgacgggctacgtgaagatccgccattctcatgccttggtctccttgtccttcctaaaaaaccttcgcctcatcctaggagaggagcagctagaagggaattactccttctacgtcctcgacaaccagaacttgcagcaactgtgggactgggaccaccgcaacctgaccatcaaagcagggaaaatgtactttgctttcaatcccaaattatgtgtttccgaaatttaccgcatggaggaagtgacggggactaaagggcgccaaagcaaaggggacataaacaccaggaacaacggggagagagcctcctgtgaaagtgacgtcctgcatttcacctccaccaccacgtcgaagaatcgcatcatcataacctggcaccggtaccggccccctgactacagggatctcatcagcttcaccgtttactacaaggaagcaccctttaagaatgtcacagagtatgatgggcaggatgcctgcggctccaacagctggaacatggtggacgtggacctcccgcccaacaaggacgtggagcccggcatcttactacatgggctgaagccctggactcagtacgccgtttacgtcaaggctgtgaccctcaccatggtggagaacgaccatatccgtggggccaagagtgagatcttgtacattcgcaccaatgcttcagttccttccattcccttggacgttctttcagcatcgaactcctcttctcagttaatcgtgaagtggaaccctccctctctgcccaacggcaacctgagttactacattgtgcgctggcagcggcagcctcaggacggctacctttaccggcacaattactgctccaaagacaaaatccccatcaggaagtatgccgacggcaccatcgacattgaggaggtcacagagaaccccaagactgaggtgtgtggtggggagaaagggccttgctgcgcctgccccaaaactgaagccgagaagcaggccgagaaggaggaggctgaataccgcaaagtctttgagaatttcctgcacaactccatcttcgtgcccagacctgaaaggaagcggagagatgtcatgcaagtggccaacaccaccatgtccagccgaagcaggaacaccacggccgcagacacctacaacatcaccgacccggaagagctggagacagagtaccctttctttgagagcagagtggataacaaggagagaactgtcatttctaaccttcggcctttcacattgtaccgcatcgatatccacagctgcaaccacgaggctgagaagctgggctgcagcgcctccaacttcgtctttgcaaggactatgcccgcagaaggagcagatgacattcctgggccagtgacctgggagccaaggcctgaaaactccatctttttaaagtggccggaacctgagaatcccaatggattgattctaatgtatgaaataaaatacggatcacaagttgaggatcagcgagaatgtgtgtccagacaggaatacaggaagtatggaggggccaagctaaaccggctaaacccggggaactacacagcccggattcaggccacatctctctctgggaatgggtcgtggacagatcctgtgttcttctatgtccaggccaaaacaggatatgaaaacttcatccatctgatcatcgctctgcccgtcgctgtcctgttgatcgtgggagggttggtgattatgctgtacgtcttccatagaaagagaaataacagcaggctggggaatggagtgctgtatgcctctgtgaacccggagtacttcagcgctgctgatgtgtacgttcctgatgagtgggaggtggctcgggagaagatcaccatgagccgggaacttgggcaggggtcgtttgggatggtctatgaaggagttgccaagggtgtggtgaaagatgaacctgaaaccagagtggccattaaaacagtgaacgaggccgcaagcatgcgtgagaggattgagtttctcaacgaagcttctgtgatgaaggagttcaattgtcaccatgtggtgcgattgctgggtgtggtgtcccaaggccagccaacactggtcatcatggaactgatgacacggggcgatctcaaaagttatctccggtctctgaggccagaaatggagaataatccagtcctagcacctccaagcctgagcaagatgattcagatggccggagagattgcagacggcatggcatacctcaacgccaataagttcgtccacagagaccttgctgcccggaattgcatggtagccgaagatttcacagtcaaaatcggagattttggtatgacgcgagatatctatgagacagactattaccggaaaggaggcaaagggctgctgcccgtgcgctggatgtctcctgagtccctcaaggatggagtcttcaccacttactcggacgtctggtccttcggggtcgtcctctgggagatcgccacactggccgagcagccctaccagggcttgtccaacgagcaagtccttcgcttcgtcatggagggcggccttctggacaagccagacaactgtcctgacatgctgtttgaactgatgcgcatgtgctggcagtataaccccaagatgaggccttccttcctggagatcatcagcagcatcaaagaggagatggagcctggcttccgggaggtctccttctactacagcgaggagaacaagctgcccgagccggaggagctggacctggagccagagaacatggagagcgtccccctggacccctcggcctcctcgtcctccctgccactgcccgacagacactcaggacacaaggccgagaacggccccggccctggggtgctggtcctccgcgccagcttcgacgagagacagccttacgcccacatgaacgggggccgcaagaacgagcgggccttgccgctgccccagtcttcgacctgctga

SEQ ID NO: 428 - DNA, 4104 bp, Homo sapiens
atgaagtctggctccggaggagggtccccgacctcgctgtgggggctcctgtttctctccgccgcgctctcgctctggccgacgagtggagaaatctgcgggccaggcatcgacatccgcaacgactatcagcagctgaagcgcctggagaactgcacggtgatcgagggctacctccacatcctgctcatctccaaggccgaggactaccgcagctaccgcttccccaagctcacggtcattaccgagtacttgctgctgttccgagtggctggcctcgagagcctcggagacctcttccccaacctcacggtcatccgcggctggaaactcttctacaactacgccctggtcatcttcgagatgaccaatctcaaggatattgggctttacaacctgaggaacattactcggggggccatcaggattgagaaaaatgctgacctctgttacctctccactgtggactggtccctgatcctggatgcggtgtccaataactacattgtggggaataagcccccaaaggaatgtggggacctgtgtccagggaccatggaggagaagccgatgtgtgagaagaccaccatcaacaatgagtacaactaccgctgctggaccacaagccgctgccagaaaatgtgcccaagcacgtgtgggaagcgggcgtgcaccgagaacaatgagtgctgccaccccgagtgcctgggcagctgcagcgcgcctgacaacgacacggcctgtgtagcttgccgccactactactatgccggtgtctgtgtgcctgcctgcccgcccaacacctacaggtttgagggctggcgctgtgtggaccgtgacttctgcgccaacatcctcagcgccgagagcagcgactccgaggggtttgtgatccacgacggcgagtgcatgcaggagtgcccctcgggcttcatccgcaacggcagccagagcatgtactgcatcccttgtgaaggtccttgcccgaaggtctgtgaggaagaaaagaaaacaaagaccattgattctgttacttctgctcagatgctccaaggatgcaccatcttcaagggcaatttgctcattaacatccgacgggggaataacattgcttcagagctggagaacttcatggggctcatcgaggtggtgacgggctacgtgaagatccgccattctcatgccttggtctccttgtccttcctaaaaaaccttcgcctcatcctaggagaggagcagctagaagggaattactccttctacgtcctcgacaaccagaacttgcagcaactgtgggactgggaccaccgcaacctgaccatcaaagcagggaaaatgtactttgctttcaatcccaaattatgtgtttccgaaatttaccgcatggaggaagtgacggggactaaagggcgccaaagcaaaggggacataaacaccaggaacaacggggagagagcctcctgtgaaagtgacgtcctgcatttcacctccaccaccacgtcgaagaatcgcatcatcataacctggcaccggtaccggccccctgactacagggatctcatcagcttcaccgtttactacaaggaagcaccctttaagaatgtcacagagtatgatgggcaggatgcctgcggctccaacagctggaacatggtggacgtggacctcccgcccaacaaggacgtggagcccggcatcttactacatgggctgaagccctggactcagtacgccgtttacgtcaaggctgtgaccctcaccatggtggagaacgaccatatccgtggggccaagagtgagatcttgtacattcgcaccaatgcttcagttccttccattcccttggacgttctttcagcatcgaactcctcttctcagttaatcgtgaagtggaaccctccctctctgcccaacggcaacctgagttactacattgtgcgctggcagcggcagcctcaggacggctacctttaccggcacaattactgctccaaagacaaaatccccatcaggaagtatgccgacggcaccatcgacattgaggaggtcacagagaaccccaagactgaggtgtgtggtggggagaaagggccttgctgcgcctgccccaaaactgaagccgagaagcaggccgagaaggaggaggctgaataccgcaaagtctttgagaatttcctgcacaactccatcttcgtgcccagacctgaaaggaagcggagagatgtcatgcaagtggccaacaccaccatgtccagccgaagcaggaacaccacggccgcagacacctacaacatcaccgacccggaagagctggagacagagtaccctttctttgagagcagagtggataacaaggagagaactgtcatttctaaccttcggcctttcacattgtaccgcatcgatatccacagctgcaaccacgaggctgagaagctgggctgcagcgcctccaacttcgtctttgcaaggactatgcccgcagaaggagcagatgacattcctgggccagtgacctgggagccaaggcctgaaaactccatctttttaaagtggccggaacctgagaatcccaatggattgattctaatgtatgaaataaaatacggatcacaagttgaggatcagcgagaatgtgtgtccagacaggaatacaggaagtatggaggggccaagctaaaccggctaaacccggggaactacacagcccggattcaggccacatctctctctgggaatgggtcgtggacagatcctgtgttcttctatgtccaggccaaaacaggatatgaaaacttcatccatctgatcatcgctctgcccgtcgctgtcctgttgatcgtgggagggttggtgattatgctgtacgtcttccatagaaagagaaataacagcaggctggggaatggagtgctgtatgcctctgtgaacccggagtacttcagcgctgctgatgtgtacgttcctgatgagtgggaggtggctcgggagaagatcaccatgagccgggaacttgggcaggggtcgtttgggatggtctatgaaggagttgccaagggtgtggtgaaagatgaacctgaaaccagagtggccattaaaacagtgaacgaggccgcaagcatgcgtgagaggattgagtttctcaacgaagcttctgtgatgaaggagttcaattgtcaccatgtggtgcgattgctgggtgtggtgtcccaaggccagccaacactggtcatcatggaactgatgacacggggcgatctcaaaagttatctccggtctctgaggccagaaatggagaataatccagtcctagcacctccaagcctgagcaagatgattcagatggccggagagattgcagacggcatggcatacctcaacgccaataagttcgtccacagagaccttgctgcccggaattgcatggtagccgaagatttcacagtcaaaatcggagattttggtatgacgcgagatatctatgagacagactattaccggaaaggaggcaaagggctgctgcccgtgcgctggatgtctcctgagtccctcaaggatggagtcttcaccacttactcggacgtctggtccttcggggtcgtcctctgggagatcgccacactggccgagcagccctaccagggcttgtccaacgagcaagtccttcgcttcgtcatggagggcggccttctggacaagccagacaactgtcctgacatgctgtttgaactgatgcgcatgtgctggcagtataaccccaagatgaggccttccttcctggagatcatcagcagcatcaaagaggagatggagcctggcttccgggaggtctccttctactacagcgaggagaacaagctgcccgagccggaggagctggacctggagccagagaacatggagagcgtccccctggacccctcggcctcctcgtcctccctgccactgcccgacagacactcaggacacaaggccgagaacggccccggccctggggtgctggtcctccgcgccagcttcgacgagagacagccttacgcccacatgaacgggggccgcaagaacgagcgggccttgccgctgccccagtcttcgacctgctga

SEQ ID NO: 429 - DNA, 4149 bp, Homo sapiens
atgggcaccgggggccggcggggggcggcggccgcgccgctgctggtggcggtggccgcgctgctactgggcgccgcgggccacctgtaccccggagaggtgtgtcccggcatggatatccggaacaacctcactaggttgcatgagctggagaattgctctgtcatcgaaggacacttgcagatactcttgatgttcaaaacgaggcccgaagatttccgagacctcagtttccccaaactcatcatgatcactgattacttgctgctcttccgggtctatgggctcgagagcctgaaggacctgttccccaacctcacggtcatccggggatcacgactgttctttaactacgcgctggtcatcttcgagatggttcacctcaaggaactcggcctctacaacctgatgaacatcacccggggttctgtccgcatcgagaagaacaatgagctctgttacttggccactatcgactggtcccgtatcctggattccgtggaggataatcacatcgtgttgaacaaagatgacaacgaggagtgtggagacatctgtccgggtaccgcgaagggcaagaccaactgccccgccaccgtcatcaacgggcagtttgtcgaacgatgttggactcatagtcactgccagaaagtttgcccgaccatctgtaagtcacacggctgcaccgccgaaggcctctgttgccacagcgagtgcctgggcaactgttctcagcccgacgaccccaccaagtgcgtggcctgccgcaacttctacctggacggcaggtgtgtggagacctgcccgcccccgtactaccacttccaggactggcgctgtgtgaacttcagcttctgccaggacctgcaccacaaatgcaagaactcgcggaggcagggctgccaccaatacgtcattcacaacaacaagtgcatccctgagtgtccctccgggtacacgatgaattccagcaacttgctgtgcaccccatgcctgggtccctgtcccaaggtgtgccacctcctagaaggcgagaagaccatcgactcggtgacgtctgcccaggagctccgaggatgcaccgtcatcaacgggagtctgatcatcaacattcgaggaggcaacaatctggcagctgagctagaagccaacctcggcctcattgaagaaatttcagggtatctaaaaatccgccgatcctacgctctggtgtcactttccttcttccggaagttacgtctgattcgaggagagaccttggaaattgggaactactccttctatgccttggacaaccagaacctaaggcagctctgggactggagcaaacacaacctcaccaccactcaggggaaactcttcttccactataaccccaaactctgcttgtcagaaatccacaagatggaagaagtttcaggaaccaaggggcgccaggagagaaacgacattgccctgaagaccaatggggacaaggcatcctgtgaaaatgagttacttaaattttcttacattcggacatcttttgacaagatcttgctgagatgggagccgtactggccccccgacttccgagacctcttggggttcatgctgttctacaaagaggccccttatcagaatgtgacggagttcgatgggcaggatgcgtgtggttccaacagttggacggtggtagacattgacccacccctgaggtccaacgaccccaaatcacagaaccacccagggtggctgatgcggggtctcaagccctggacccagtatgccatctttgtgaagaccctggtcaccttttcggatgaacgccggacctatggggccaagagtgacatcatttatgtccagacagatgccaccaacccctctgtgcccctggatccaatctcagtgtctaactcatcatcccagattattctgaagtggaaaccaccctccgaccccaatggcaacatcacccactacctggttttctgggagaggcaggcggaagacagtgagctgttcgagctggattattgcctcaaagggctgaagctgccctcgaggacctggtctccaccattcgagtctgaagattctcagaagcacaaccagagtgagtatgaggattcggccggcgaatgctgctcctgtccaaagacagactctcagatcctgaaggagctggaggagtcctcgtttaggaagacgtttgaggattacctgcacaacgtggttttcgtccccagaaaaacctcttcaggcactggtgccgaggaccctaggccatctcggaaacgcaggtcccttggcgatgttgggaatgtgacggtggccgtgcccacggtggcagctttccccaacacttcctcgaccagcgtgcccacgagtccggaggagcacaggccttttgagaaggtggtgaacaaggagtcgctggtcatctccggcttgcgacacttcacgggctatcgcatcgagctgcaggcttgcaaccaggacacccctgaggaacggtgcagtgtggcagcctacgtcagtgcgaggaccatgcctgaagccaaggctgatgacattgttggccctgtgacgcatgaaatctttgagaacaacgtcgtccacttgatgtggcaggagccgaaggagcccaatggtctgatcgtgctgtatgaagtgagttatcggcgatatggtgatgaggagctgcatctctgcgtctcccgcaagcacttcgctctggaacggggctgcaggctgcgtgggctgtcaccggggaactacagcgtgcgaatccgggccacctcccttgcgggcaacggctcttggacggaacccacctatttctacgtgacagactatttagacgtcccgtcaaatattgcaaaaattatcatcggccccctcatctttgtctttctcttcagtgttgtgattggaagtatttatctattcctgagaaagaggcagccagatgggccgctgggaccgatttacgcttcttcaaaccctgagtatctcagtgccagtgatgtgtttccatgctctgtgtacgtgccggacgagtgggaggtgtctcgagagaagatcaccctccttcgagagctggggcagggctccttcggcatggtgtatgagggcaatgccagggacatcatcaagggtgaggcagagacccgcgtggcggtgaagacggtcaacgagtcagccagtctccgagagcggattgagttcctcaatgaggcctcggtcatgaagggcttcacctgccatcacgtggtgcgcctcctgggagtggtgtccaagggccagcccacgctggtggtgatggagctgatggctcacggagacctgaagagctacctccgttctctgcggccagaggctgagaataatcctggccgccctccccctacccttcaagagatgattcagatggcggcagagattgctgacgggatggcctacctgaacgccaagaagtttgtgcatcgggacctggcagcgagaaactgcatggtcgcccatgattttactgtcaaaattggagactttggaatgaccagagacatctatgaaacggattactaccggaaagggggcaagggtctgctccctgtacggtggatggcaccggagtccctgaaggatggggtcttcaccacttcttctgacatgtggtcctttggcgtggtcctttgggaaatcaccagcttggcagaacagccttaccaaggcctgtctaatgaacaggtgttgaaatttgtcatggatggagggtatctggatcaacccgacaactgtccagagagagtcactgacctcatgcgcatgtgctggcaattcaaccccaagatgaggccaaccttcctggagattgtcaacctgctcaaggacgacctgcaccccagctttccagaggtgtcgttcttccacagcgaggagaacaaggctcccgagagtgaggagctggagatggagtttgaggacatggagaatgtgcccctggaccgttcctcgcactgtcagagggaggaggcggggggccgggatggagggtcctcgctgggtttcaagcggagctacgaggaacacatcccttacacacacatgaacggaggcaagaaaaacgggcggattctgaccttgcctcggtccaatccttcctaa

SEQ ID NO: 430 - DNA, 1863 bp, Homo sapiens
atgaacaactttatcctcctggaagaacagctcatcaagaaatcccaacaaaagagaagaacttctccctcgaactttaaagtccgcttctttgtgttaaccaaagccagcctggcatactttgaagatcgtcatgggaagaagcgcacgctgaaggggtccattgagctctcccgaatcaaatgtgttgagattgtgaaaagtgacatcagcatcccatgccactataaatacccgtttcaggtggtgcatgacaactacctcctatatgtgtttgctccagatcgtgagagccggcagcgctgggtgctggcccttaaagaagaaacgaggaataataacagtttggtgcctaaatatcatcctaatttctggatggatgggaagtggaggtgctgttctcagctggagaagcttgcaacaggctgtgcccaatatgatccaaccaagaatgcttcaaagaagcctcttcctcctactcctgaagacaacaggcgaccactttgggaacctgaagaaactgtggtcattgccttatatgactaccaaaccaatgatcctcaggaactcgcactgcggcgcaacgaagagtactgcctgctggacagttctgagattcactggtggagagtccaggacaggaatgggcatgaaggatatgtaccaagcagttatctggtggaaaaatctccaaataatctggaaacctatgagtggtacaataagagtatcagccgagacaaagctgaaaaacttcttttggacacaggcaaagaaggagccttcatggtaagggattccaggactgcaggaacatacaccgtgtctgttttcaccaaggctgttgtaagtgagaacaatccctgtataaagcattatcacatcaaggaaacaaatgacaatcctaagcgatactatgtggctgaaaagtatgtgttcgattccatccctcttctcatcaactatcaccaacataatggaggaggcctggtgactcgactccggtatccagtttgttttgggaggcagaaagccccagttacagcagggctgagatacgggaaatgggtgatcgacccctcagagctcacttttgtgcaagagattggcagtgggcaatttgggttggtgcatctgggctactggctcaacaaggacaaggtggctatcaaaaccattcgggaaggggctatgtcagaagaggacttcatagaggaggctgaagtaatgatgaaactctctcatcccaaactggtgcagctgtatggggtgtgcctggagcaggcccccatctgcctggtgtttgagttcatggagcacggctgcctgtcagattatctacacacccagcggggactttttgctgcagagaccctgctgggcatgtgtctggatgtgtgtgagggcatggcctacctggaagaggcatgtgtcatccacagagacttggctgccagaaattgtttggtgggagaaaaccaagtcatcaaggtgtctgactttgggatgacaaggttcgttctggatgatcagtacaccagttccacaggcaccaaattcccggtgaagtgggcatccccagaggttttctctttcagtcgctatagcagcaagtccgatgtgtggtcatttggtgtgctgatgtgggaagttttcagtgaaggcaaaatcccgtatgaaaaccgaagcaactcagaggtggtggaagacatcagtaccggatttcggttgtacaagccccggctggcctccacacacgtctaccagattatgaatcactgctggaaagagagaccagaagatcggccagccttctccagactgctgcgtcaactggctgaaattgcagaatcaggactttag

SEQ ID NO: 431 - DNA, 3429 bp, Homo sapiens
atggctttctgtgctaaaatgaggagctccaagaagactgaggtgaacctggaggcccctgagccaggggtggaagtgatcttctatctgtcggacagggagcccctccggctgggcagtggagagtacacagcagaggaactgtgcatcagggctgcacaggcatgccgtatctctcctctttgtcacaacctctttgccctgtatgacgagaacaccaagctctggtatgctccaaatcgcaccatcaccgttgatgacaagatgtccctccggctccactaccggatgaggttctatttcaccaattggcatggaaccaacgacaatgagcagtcagtgtggcgtcattctccaaagaagcagaaaaatggctacgagaaaaaaaagattccagatgcaacccctctccttgatgccagctcactggagtatctgtttgctcagggacagtatgatttggtgaaatgcctggctcctattcgagaccccaagaccgagcaggatggacatgatattgagaacgagtgtctagggatggctgtcctggccatctcacactatgccatgatgaagaagatgcagttgccagaactgcccaaggacatcagctacaagcgatatattccagaaacattgaataagtccatcagacagaggaaccttctcaccaggatgcggataaataatgttttcaaggatttcctaaaggaatttaacaacaagaccatttgtgacagcagcgtgtccacgcatgacctgaaggtgaaatacttggctaccttggaaactttgacaaaacattacggtgctgaaatatttgagacttccatgttactgatttcatcagaaaatgagatgaattggtttcattcgaatgacggtggaaacgttctctactacgaagtgatggtgactgggaatcttggaatccagtggaggcataaaccaaatgttgtttctgttgaaaaggaaaaaaataaactgaagcggaaaaaactggaaaataaagacaagaaggatgaggagaaaaacaagatccgggaagagtggaacaatttttcattcttccctgaaatcactcacgttgtaataaaggagtctgtggtcagcattaacaagcaggacaacaagaaaatggaactgaagctctcttcccacgaggaggccttgtcctttgtgtccctggtagatggctacttccggctcacagcagatgcccatcattacctctgcaccgacgtggcccccccgttgatcgtccacaacatacagaatggctgtcatggtccaatctgtacagaatacgccatcaataaattgcggcaagaaggaagcgaggaggggatgtacgtgctgaggtggagctgcaccgactttgacaacatcctcatgaccgtcacctgctttgagaagtctgagcaggtgcagggtgcccagaagcagttcaagaactttcagatcgaggtgcagaagggccgctacagtctgcacggttcggaccgcagcttccccagcttgggagacctcatgagccacctcaagaagcagatcctgcgcacggataacatcagcttcatgctaaaacgctgctgccagcccaagccccgagaaatctccaacctgctggtggctactaagaaagcccaggagtggcagcccgtctaccccatgagccagctgagtttcgatcggatcctcaagaaggatctggtgcagggcgagcaccttgggagaggcacgagaacacacatctattctgggaccctgatggattacaaggatgacgaaggaacttctgaagagaagaagataaaagtgatcctcaaagtcttagaccccagccacagggatatttccctggccttcttcgaggcagccagcatgatgagacaggtctcccacaaacacatcgtgtacctctatggcgtctgtgtccgcgacgtggagaatatcatggtggaagagtttgtggaagggggtcctctggatctcttcatgcaccggaaaagtgatgtccttaccacaccatggaaattcaaagttgccaaacagctggccagtgccctgagctacttggaggataaagacctggtccatggaaatgtgtgtactaaaaacctcctcctggcccgtgagggaatcgacagtgagtgtggcccattcatcaagctcagtgaccccggcatccccattacggtgctgtctaggcaagaatgcattgaacgaatcccatggattgctcctgagtgtgttgaggactccaagaacctgagtgtggctgctgacaagtggagctttggaaccacgctctgggaaatctgctacaatggcgagatccccttgaaagacaagacgctgattgagaaagagagattctatgaaagccggtgcaggccagtgacaccatcatgtaaggagctggctgacctcatgacccgctgcatgaactatgaccccaatcagaggcctttcttccgagccatcatgagagacattaataagcttgaagagcagaatccagatattgtttccagaaaaaaaaaccagccaactgaagtggaccccacacattttgagaagcgcttcctaaagaggatccgtgacttgggagagggccactttgggaaggttgagctctgcaggtatgaccccgaagacaatacaggggagcaggtggctgttaaatctctgaagcctgagagtggaggtaaccacatagctgatctgaaaaaggaaatcgagatcttaaggaacctctatcatgagaacattgtgaagtacaaaggaatctgcacagaagacggaggaaatggtattaagctcatcatggaatttctgccttcgggaagccttaaggaatatcttccaaagaataagaacaaaataaacctcaaacagcagctaaaatatgccgttcagatttgtaaggggatggactatttgggttctcggcaatacgttcaccgggacttggcagcaagaaatgtccttgttgagagtgaacaccaagtgaaaattggagacttcggtttaaccaaagcaattgaaaccgataaggagtattacaccgtcaaggatgaccgggacagccctgtgttttggtatgctccagaatgtttaatgcaatctaaattttatattgcctctgacgtctggtcttttggagtcactctgcatgagctgctgacttactgtgattcagattctagtcccatggctttgttcctgaaaatgataggcccaacccatggccagatgacagtcacaagacttgtgaatacgttaaaagaaggaaaacgcctgccgtgcccacctaactgtccagatgaggtttatcagcttatgagaaaatgctgggaattccaaccatccaatcggacaagctttcagaaccttattgaaggatttgaagcacttttaaaataa

SEQ ID NO: 432 - DNA, 3429 bp, Homo sapiens
atggctttctgtgctaaaatgaggagctccaagaagactgaggtgaacctggaggcccctgagccaggggtggaagtgatcttctatctgtcggacagggagcccctccggctgggcagtggagagtacacagcagaggaactgtgcatcagggctgcacaggcatgccgtatctctcctctttgtcacaacctctttgccctgtatgacgagaacaccaagctctggtatgctccaaatcgcaccatcaccgttgatgacaagatgtccctccggctccactaccggatgaggttctatttcaccaattggcatggaaccaacgacaatgagcagtcagtgtggcgtcattctccaaagaagcagaaaaatggctacgagaaaaaaaagattccagatgcaacccctctccttgatgccagctcactggagtatctgtttgctcagggacagtatgatttggtgaaatgcctggctcctattcgagaccccaagaccgagcaggatggacatgatattgagaacgagtgtctagggatggctgtcctggccatctcacactatgccatgatgaagaagatgcagttgccagaactgcccaaggacatcagctacaagcgatatattccagaaacattgaataagtccatcagacagaggaaccttctcaccaggatgcggataaataatgttttcaaggatttcctaaaggaatttaacaacaagaccatttgtgacagcagcgtgtccacgcatgacctgaaggtgaaatacttggctaccttggaaactttgacaaaacattacggtgctgaaatatttgagacttccatgttactgatttcatcagaaaatgagatgaattggtttcattcgaatgacggtggaaacgttctctactacgaagtgatggtgactgggaatcttggaatccagtggaggcataaaccaaatgttgtttctgttgaaaaggaaaaaaataaactgaagcggaaaaaactggaaaataaagacaagaaggatgaggagaaaaacaagatccgggaagagtggaacaatttttcattcttccctgaaatcactcacattgtaataaaggagtctgtggtcagcattaacaagcaggacaacaagaaaatggaactgaagctctcttcccacgaggaggccttgtcctttgtgtccctggtagatggctacttccggctcacagcagatgcccatcattacctctgcaccgacgtggcccccccgttgatcgtccacaacatacagaatggctgtcatggtccaatctgtacagaatacgccatcaataaattgcggcaagaaggaagcgaggaggggatgtacgtgctgaggtggagctgcaccgactttgacaacatcctcatgaccgtcacctgctttgagaagtctgagcaggtgcagggtgcccagaagcagttcaagaactttcagatcgaggtgcagaagggctgctacagtctgcacggttcggaccgcagcttccccagcttgggagacctcatgagccacctcaagaagcagatcctgcgcacggataacatcagcttcatgctaaaacgctgctgccagcccaagccccgagaaatctccaacctgctggtggctactaagaaagcccaggagtggcagcccgtctaccccatgagccagctgagtttcgatcggatcctcaagaaggatctggtgcagggcgagcaccttgggagaggcacgagaacacacatctattctgggaccctgatggattacaaggatgacgaaggaacttctgaagagaagaagataaaagtgatcctcaaagtcttagaccccagccacagggatatttccctggccttcttcgaggcagccagcatgatgagacaggtctcccacaaacacatcgtgtacctctatggcgtctgtgtccgcgacgtggagaatatcatggtggaagagtttgtggaagggggtcctctggatctcttcatgcaccggaaaagtgatgtccttaccacaccatggaaattcaaagttgccaaacagctggccagtgccctgagctacttggaggataaagacctggtccatggaaatgtgtgtactaaaaacctcctcctggcccgtgagggaatcgacagtgagtgtggcccattcatcaagctcagtgaccccggcatccccattacggtgctgtctaggcaagaatgcattgaacgaatcccatggattgctcctgagtgtgttgaggactccaagaacctgagtgtggctgctgacaagtggagctttggaaccacgctctgggaaatctgctacaatggcgagatccccttgaaagacaagacgctgattgagaaagagagattctatgaaagccggtgcaggccagtgacaccatcatgtaaggagctggctgacctcatgacccgctgcatgaactatgaccccaatcagaggcctttcttccgagccatcatgagagacattaataagcttgaagagcagaatccagatattgtttccagaaaaaaaaaccagccaactgaagtggaccccacacattttgagaagcgcttcctaaagaggatccgtgacttgggagagggccactttgggaaggttgagctctgcaggtatgaccccgaagacaatacaggggagcaggtggctgttaaatctctgaagcctgagagtggaggtaaccacatagctgatctgaaaaaggaaatcgagatcttaaggaacctctatcatgagaacattgtgaagtacaaaggaatctgcacagaagacggaggaaatggtattaagctcatcatggaatttctgccttcgggaagccttaaggaatatcttccaaagaataagaacaaaataaacctcaaacagcagctaaaatatgccgttcagatttgtaaggggatggactatttgggttctcggcaatacgttcaccgggacttggcagcaagaaatgtccttgttgagagtgaacaccaagtgaaaattggagacttcggtttaaccaaagcaattgaaaccgataaggagtattacaccgtcaaggatgaccgggacagccctgtgttttggtatgctccagaatgtttaatgcaatctaaattttatattgcctctgacgtctggtcttttggagtcactctgcatgagctgctgacttactgtgattcagattctagtcccatggctttgttcctgaaaatgataggcccaacccatggccagatgacagtcacaagacttgtgaatacgttaaaagaaggaaaacgcctgccgtgcccacctaactgtccagatgaggtttatcagcttatgagaaaatgctgggaattccaaccatccaatcggacaagctttcagaaccttattgaaggatttgaagcacttttaaaataa

SEQ ID NO: 433 - DNA, 3428 bp, Homo sapiens
atggctttctgtgctaaaatgaggagctccaagaagactgaggtgaacctggaggcccctgagccaggggtggaagtgatcttctatctgtcggacagggagcccctccggctgggcagtggagagtacacagcagaggaactgtgcatcagggctgcacaggcatgccgtatctctcctctttgtcacaacctctttgccctgtatgacgagaacaccaagctctggtatgctccaaatcgcaccatcaccgttgatgacaagatgtccctccggctccactaccggatgaggttctatttcaccaattggcatggaaccaacgacaatgagcagtcagtgtggcgtcattctccaaagaagcagaaaaatggctacgagaaaaaaaagattccagatgcaacccctctccttgatgccagctcactggagtatctgtttgctcagggacagtatgatttggtgaaatgcctggctcctattcgagaccccaagaccgagcaggatggacatgatattgagaacgagtgtctagggatggctgtcctggccatctcacactatgccatgatgaagaagatgcagttgccagaactgcccaaggacatcagctacaagcgatatattccagaaacattgaataagtccatcagacagaggaaccttctcaccaggatgcggataaataatgttttcaaggatttcctaaaggaatttaacaacaagaccatttgtgacagcagcgtgtccacgcatgacctgaaggtgaaatacttggctaccttggaaactttgacaaaacattacggtgctgaaatatttgagacttccatgttactgatttcatcagaaaatgagatgaattggtttcattcgaatgacggtggaaacgttctctactacgaagtgatggtgactgggaatcttggaatccagtggaggcataaaccaaatgttgtttctgttgaaaaggaaaaaaataaactgaagcggaaaaaactggaaaataaagacaagaaggatgaggagaaaaacaagatccgggaagagtggaacaatttttcattcttccctgaaatcactcacattgtaataaaggagtctgtggtcagcattaacaagcaggacaacaagaaaatggaactgaagctctcttcccacgaggaggccttgtcctttgtgtccctggtagatggctacttccggctcacagcagatgcccatcattacctctgcaccgacgtggcccccccgttgatcgtccacaacatacagaatggctgtcatggtccaatctgtacagaatacgccatcaataaattgcggcaagaaggaagcgaggaggggatgtacgtgctgaggtggagctgcaccgactttgacaacatcctcatgaccgtcacctgctttgagaagtctgagcaggtgcagggtgcccagaagcagttcaagaactttcagatcgaggtgcagaagggccgctacagtctgcacggttcggaccgcagcttccccagcttgggagacctcatgagccacctcaagaagcagatcctgcgcacggataacatcagcttcatgctaaaacgctgctgccagcccaagccccgagaaatctccaacctgctggtggctactaagaaagcccaggagtggcagcccgtctaccccatgagccagctgagtttcgatcggatcctcaagaaggatctggtgcagggcgagcaccttgggagaggcacgagaacacacatctattctgggaccctgatggattacaaggatgacgaaggaacttctgaagagaagaagataaaagtgatcctcaaagtcttagaccccagccacagggatatttccctggccttcttcgaggcagccagcatgatgagacaggtctcccacaaacacatcgtgtacctctatggcgtctgtgtccgcgacgtggagaatatcatggtggaagagtttgtggaagggggtcctctggatctcttcatgcaccggaaaagtgatgtccttaccacaccatggaaattcaaagttgccaaacagctggccagtgccctgagctacttggaggataaagacctggtccatggaaatgtgtgtactaaaaacctcctcctggcccgtgagggaatcgacagtgagtgtggcccattcatcaagctcagtgaccccggcatccccattacggtgctgtctaggcaagaatgcattgaacgaatcccatggattgctcctgagtgtgttgaggactccaagaacctgagtgtggctgctgacaagtggagctttggaaccacgctctgggaaatctgctacaatggcgagatccccttgaaagacaagacgctgattgagaaagagagattctatgaaagccggtgcaggccagtgacaccatcatgtaaggagctggctgacctcatgacccgctgcatgaactatgaccccaatcagaggcctttcttccgagccatcatgagagacattaataagcttgaagagcagaatccagatattgtttccagaaaaaaaaccagccaactgaagtggaccccacacattttgagaagcgcttcctaaagaggatccgtgacttgggagagggccactttgggaaggttgagctctgcaggtatgaccccgaagacaatacaggggagcaggtggctgttaaatctctgaagcctgagagtggaggtaaccacatagctgatctgaaaaaggaaatcgagatcttaaggaacctctatcatgagaacattgtgaagtacaaaggaatctgcacagaagacggaggaaatggtattaagctcatcatggaatttctgccttcgggaagccttaaggaatatcttccaaagaataagaacaaaataaacctcaaacagcagctaaaatatgccgttcagatttgtaaggggatggactatttgggttctcggcaatacgttcaccgggacttggcagcaagaaatgtccttgttgagagtgaacaccaagtgaaaattggagacttcggtttaaccaaagcaattgaaaccgataaggagtattacaccgtcaaggatgaccgggacagccctgtgttttggtatgctccagaatgtttaatgcaatctaaattttatattgcctctgacgtctggtcttttggagtcactctgcatgagctgctgacttactgtgattcagattctagtcccatggctttgttcctgaaaatgataggcccaacccatggccagatgacagtcacaagacttgtgaatacgttaaaagaaggaaaacgcctgccgtgcccacctaactgtccagatgaggtttatcagcttatgagaaaatgctgggaattccaaccatccaatcggacaagctttcagaaccttattgaaggatttgaagcacttttaaaataa

SEQ ID NO: 434 - DNA, 3399 bp, Homo sapiens
atgggaatggcctgccttacgatgacagaaatggagggaacatccacctcttctatatatcagaatggtgatatttctggaaatgccaattctatgaagcaaatagatccagttcttcaggtgtatctttaccattcccttgggaaatctgaggcagattatctgacctttccatctggggagtatgttgcagaagaaatctgtattgctgcttctaaagcttgtggtatcacacctgtgtatcataatatgtctgctttaatgagtgaaacagaaaggatctggtatccacccaaccatgtcttccatatagatgagtcaaccaggcataatgtactctacagaataagattttactttcctcgttggtattgcagtggcagcaacagagcctatcggcatggaatatctcgaggtgctgaagctcctcttcttgatgactttgtcatgtcttacctctttgctcagtggcggcatgattttgtgcacggatggataaaagtacctgtgactcatgaaacacaggaagaatgtcttgggatggcagtgttagatatgatgagaatagccaaagaaaacgatcaaaccccactggccatctataactctatcagctacaagacattcttaccaaaatgtattcgagcaaagatccaagactatcatattttgacaaggaagcgaataaggtacagatttcgcagatttattcagcaattcagccaatgcaaagccactgccagaaacttgaaacttaagtatcttataaatctggaaactctgcagtctgccttctacacagagaaatttgaagtaaaagaacctggaagtggtccttcaggtgaggagatttttgcaaccattataataactggaaacggtggaattcagtggtcaagagggaaacataaagaaagtgagacactgacagaacaggatttacagttatattgcgattttcctaatattattgatgtcagtattaagcaagcaaaccaagagggttcaaatgaaagccgagttgtaactatccataagcaagatggtaaaaatctggaaattgaacttagctcattaagggaagctttgtctttcgtgtcattaattgatggatattatagattaactgcagatgcacatcattacctctgtaaagaagtagcacctccagccgtgcttgaaaatatacaaagcaactgtcatggcccaatttcgatggattttgccattagtaaactgaagaaagcaggtaatcagactggactgtatgtacttcgatgcagtcctaaggactttaataaatattttttgacttttgctgtcgagcgagaaaatgtcattgaatataaacactgtttgattacaaaaaatgagaatgaagagtacaacctcagtgggacaaagaagaacttcagcagtcttaaagatcttttgaattgttaccagatggaaactgttcgctcagacaatataattttccagtttactaaatgctgtcccccaaagccaaaagataaatcaaaccttctagtcttcagaacgaatggtgtttctgatgtaccaacctcaccaacattacagaggcctactcatatgaaccaaatggtgtttcacaaaatcagaaatgaagatttgatatttaatgaaagccttggccaaggcacttttacaaagatttttaaaggcgtacgaagagaagtaggagactacggtcaactgcatgaaacagaagttcttttaaaagttctggataaagcacacagaaactattcagagtctttctttgaagcagcaagtatgatgagcaagctttctcacaagcatttggttttaaattatggagtatgtgtctgtggagacgagaatattctggttcaggagtttgtaaaatttggatcactagatacatatctgaaaaagaataaaaattgtataaatatattatggaaacttgaagttgctaaacagttggcatgggccatgcattttctagaagaaaacacccttattcatgggaatgtatgtgccaaaaatattctgcttatcagagaagaagacaggaagacaggaaatcctcctttcatcaaacttagtgatcctggcattagtattacagttttgccaaaggacattcttcaggagagaataccatgggtaccacctgaatgcattgaaaatcctaaaaatttaaatttggcaacagacaaatggagttttggtaccactttgtgggaaatctgcagtggaggagataaacctctaagtgctctggattctcaaagaaagctacaattttatgaagataggcatcagcttcctgcaccaaagtgggcagaattagcaaaccttataaataattgtatggattatgaaccagatttcaggccttctttcagagccatcatacgagatcttaacagtttgtttactccagattatgaactattaacagaaaatgacatgttaccaaatatgaggataggtgccctagggttttctggtgcctttgaagaccgggatcctacacagtttgaagagagacatttgaaatttctacagcaacttggcaagggtaattttgggagtgtggagatgtgccggtatgaccctctacaggacaacactggggaggtggtcgctgtaaaaaagcttcagcatagtactgaagagcacctaagagactttgaaagggaaattgaaatcctgaaatccctacagcatgacaacattgtaaagtacaagggagtgtgctacagtgctggtcggcgtaatctaaaattaattatggaatatttaccatatggaagtttacgagactatcttcaaaaacataaagaacggatagatcacataaaacttctgcagtacacatctcagatatgcaagggtatggagtatcttggtacaaaaaggtatatccacagggatctggcaacgagaaatatattggtggagaacgagaacagagttaaaattggagattttgggttaaccaaagtcttgccacaagacaaagaatactataaagtaaaagaacctggtgaaagtcccatattctggtatgctccagaatcactgacagagagcaagttttctgtggcctcagatgtttggagctttggagtggttctgtatgaacttttcacatacattgagaagagtaaaagtccaccagcggaatttatgcgtatgattggcaatgacaaacaaggacagatgatcgtgttccatttgatagaacttttgaagaataatggaagattaccaagaccagatggatgcccagatgagatctatatgatcatgacagaatgctggaacaataatgtaaatcaacgcccctcctttagggatctagctcttcgagtggatcaaataagggataacatggctggatga

SEQ ID NO: 435 - DNA, 3399 bp, Homo sapiens
atgggaatggcctgccttacgatgacagaaatggagggaacatccacctcttctatatatcagaatggtgatatttctggaaatgccaattctatgaagcaaatagatccagttcttcaggtgtatctttaccattcccttgggaaatctgaggcagattatctgacctttccatctggggagtatgttgcagaagaaatctgtattgctgcttctaaagcttgtggtatcacacctgtgtatcataatatgtttgctttaatgagtgaaacagaaaggatctggtatccacccaaccatgtcttccatatagatgagtcaaccaggcataatgtactctacagaataagattttactttcctcgttggtattgcagtggcagcaacagagcctatcggcatggaatatctcgaggtgctgaagctcctcttcttgatgactttgtcatgtcttacctctttgctcagtggcggcatgattttgtgcacggatggataaaagtacctgtgactcatgaaacacaggaagaatgtcttgggatggcagtgttagatatgatgagaatagccaaagaaaacgatcaaaccccactggccatctataactctatcagctacaagacattcttaccaaaatgtattcgagcaaagatccaagactatcatattttgacaaggaagcgaataaggtacagatttcgcagatttattcagcaattcagccaatgcaaagccactgccagaaacttgaaacttaagtatcttataaatctggaaactctgcagtctgccttctacacagagaaatttgaagtaaaagaacctggaagtggtccttcaggtgaggagatttttgcaaccattataataactggaaacggtggaattcagtggtcaagagggaaacataaagaaagtgagacactgacagaacaggatttacagttatattgcgattttcctaatattattgatgtcagtattaagcaagcaaaccaagagggttcaaatgaaagccgagttgtaactatccataagcaagatggtaaaaatctggaaattgaacttagctcattaagggaagctttgtctttcgtgtcattaattgatggatattatagattaactgaagatgcacatcattacctctgtaaagaagtagcacctccagccgtgcttgaaaatatacaaagcaactgtcatggcccaatttcgatggattttgccattagtaaactgaagaaagcaggtaatcagactggactgtatgtacttcgatgcagtcctaaggactttaataaatattttttgacttttgctgtcgagcgagaaaatgtcattgaatataaacactgtttgattacaaaaaatgagaatgaagagtacaacctcagtgggacaaagaagaacttcagcagtcttaaagatcttttgaattgttaccagatggaaactgttcgctcagacaatataattttccagtttactaaatgctgtcccccaaagccaaaagataaatcaaaccttctagtcttcagaacgaatggtgtttctgatgtaccaacctcaccaacattacagaggcctactcatatgaaccaaatggtgtttcacaaaatcagaaatgaagatttgatatttaatgaaagccttggccaaggcacttttacaaagatttttaaaggcgtacgaagagaagtaggagactacggtcaactgcatgaaacagaagttcttttaaaagttctggataaagcacacagaaactattcagagtctttctttgaagcagcaagtatgatgagcaagctttctcacaagcatttggttttaaattatggagtatgtgtctgtggagacgagaatattctggttcaggagtttgtaaaatttggatcactagatacatatctgaaaaagaataaaaattgtataaatatattatggaaacttgaagttgctaaacagttggcatgggccatgcattttctagaagaaaacacccttattcatgggaatgtatgtgccaaaaatattctgcttatcagagaagaagacaggaagacaggaaatcctcctttcatcaaacttagtgatcctggcattagtattacagttttgccaaaggacattcttcaggagagaataccatgggtaccacctgaatgcattgaaaatcctaaaaatttaaatttggcaacagacaaatggagttttggtaccactttgtgggaaatctgcagtggaggagataaacctctaagtgctctggattctcaaagaaagctacaattttatgaagataggcatcagcttcctgcaccaaagtgggcagaattagcaaaccttataaataattgtatggattatgaaccagatttcaggccttctttcagagccatcatacgagatcttaacagtttgtttactccagattatgaactattaacagaaaatgacatgttaccaaatatgaggataggtgccctagggttttctggtgcctttgaagaccgggatcctacacagtttgaagagagacatttgaaatttctacagcaacttggcaagggtaattttgggagtgtggagatgtgccggtatgaccctctacaggacaacactggggaggtggtcgctgtaaaaaagcttcagcatagtactgaagagcacctaagagactttgaaagggaaattgaaatcctgaaatccctacagcatgacaacattgtaaagtacaagggagtgtgctacagtgctggtcggcgtaatctaaaattaattatggaatatttaccatatggaagtttacgagactatcttcaaaaacataaagaacggatagatcacataaaacttctgcagtacacatctcagatatgcaagggtatggagtatcttggtacaaaaaggtatatccacagggatctggcaacgagaaatatattggtggagaacgagaacagagttaaaattggagattttgggttaaccaaagtcttgccacaagacaaagaatactataaagtaaaagaacctggtgaaagtcccatattctggtatgctccagaatcactgacagagagcaagttttctgtggcctcagatgtttggagctttggagtggttctgtatgaacttttcacatacattgagaagagtaaaagtccaccagcggaatttatgcgtatgattggcaatgacaaacaaggacagatgatcgtgttccatttgatagaacttttgaagaataatggaagattaccaagaccagatggatgcccagatgagatctatatgatcatgacagaatgctggaacaataatgtaaatcaacgcccctcctttagggatctagctcttcgagtggatcaaataagggataacatggctggatga

SEQ ID NO: 436 - DNA, 3399 bp, Homo sapiens
atgggaatggcctgccttacgatgacagaaatggagggaacatccacctcttctatatatcagaatggtgatatttctggaaatgccaattctatgaagcaaatagatccagttcttcaggtgtatctttaccattcccttgggaaatctgaggcagattatctgacctttccatctggggagtatgttgcagaagaaatctgtattgctgcttctaaagcttgtggtatcacacctgtgtatcataatatgtttgctttaatgagtgaaacagaaaggatctggtatccacccaaccatgtcttccatatagatgagtcaaccaggcataatgtactctacagaataagattttactttcctcgttggtattgcagtggcagcaacagagcctatcggcatggaatatctcgaggtgctgaagctcctcttcttgatgactttgtcatgtcttacctctttgctcagtggcggcatgattttgtgcacggatggataaaagtacctgtgactcatgaaacacaggaagaatgtcttgggatggcagtgttagatatgatgagaatagccaaagaaaacgatcaaaccccactggccatctataactctatcagctacaagacattcttaccaaaatgtattcgagcaaagatccaagactatcatattttgacaaggaagcgaataaggtacagatttcgcagatttattcagcaattcagccaatgcaaagccactgccagaaacttgaaacttaagtatcttataaatctggaaactctgcagtctgccttctacacagagaaatttgaagtaaaagaacctggaagtggtccttcaggtgaggagatttttgcaaccattataataactggaaacggtggaattcagtggtcaagagggaaacataaagaaagtgagacactgacagaacaggatttacagttatattgcgattttcctaatattattgatgtcagtattaagcaagcaaaccaagagggttcaaatgaaagccgagttgtaactatccataagcaagatggtaaaaatctggaaattgaacttagctcattaagggaagctttgtctttcgtgtcattaattgatggatattatagattaactgcagatgcacatcattacccctgtaaagaagtagcacctccagccgtgcttgaaaatatacaaagcaactgtcatggcccaatttcgatggattttgccattagtaaactgaagaaagcaggtaatcagactggactgtatgtacttcgatgcagtcctaaggactttaataaatattttttgacttttgctgtcgagcgagaaaatgtcattgaatataaacactgtttgattacaaaaaatgagaatgaagagtacaacctcagtgggacaaagaagaacttcagcagtcttaaagatcttttgaattgttaccagatggaaactgttcgctcagacaatataattttccagtttactaaatgctgtcccccaaagccaaaagataaatcaaaccttctagtcttcagaacgaatggtgtttctgatgtaccaacctcaccaacattacagaggcctactcatatgaaccaaatggtgtttcacaaaatcagaaatgaagatttgatatttaatgaaagccttggccaaggcacttttacaaagatttttaaaggcgtacgaagagaagtaggagactacggtcaactgcatgaaacagaagttcttttaaaagttctggataaagcacacagaaactattcagagtctttctttgaagcagcaagtatgatgagcaagctttctcacaagcatttggttttaaattatggagtatgtgtctgtggagacgagaatattctggttcaggagtttgtaaaatttggatcactagatacatatctgaaaaagaataaaaattgtataaatatattatggaaacttgaagttgctaaacagttggcatgggccatgcattttctagaagaaaacacccttattcatgggaatgtatgtgccaaaaatattctgcttatcagagaagaagacaggaagacaggaaatcctcctttcatcaaacttagtgatcctggcattagtattacagttttgccaaaggacattcttcaggagagaataccatgggtaccacctgaatgcattgaaaatcctaaaaatttaaatttggcaacagacaaatggagttttggtaccactttgtgggaaatctgcagtggaggagataaacctctaagtgctctggattctcaaagaaagctacaattttatgaagataggcatcagcttcctgcaccaaagtgggcagaattagcaaaccttataaataattgtatggattatgaaccagatttcaggccttctttcagagccatcatacgagatcttaacagtttgtttactccagattatgaactattaacagaaaatgacatgttaccaaatatgaggataggtgccctagggttttctggtgcctttgaagaccgggatcctacacagtttgaagagagacatttgaaatttctacagcaacttggcaagggtaattttgggagtgtggagatgtgccggtatgaccctctacaggacaacactggggaggtggtcgctgtaaaaaagcttcagcatagtactgaagagcacctaagagactttgaaagggaaattgaaatcctgaaatccctacagcatgacaacattgtaaagtacaagggagtgtgctacagtgctggtcggcgtaatctaaaattaattatggaatatttaccatatggaagtttacgagactatcttcaaaaacataaagaacggatagatcacataaaacttctgcagtacacatctcagatatgcaagggtatggagtatcttggtacaaaaaggtatatccacagggatctggcaacgagaaatatattggtggagaacgagaacagagttaaaattggagattttgggttaaccaaagtcttgccacaagacaaagaatactataaagtaaaagaacctggtgaaagtcccatattctggtatgctccagaatcactgacagagagcaagttttctgtggcctcagatgtttggagctttggagtggttctgtatgaacttttcacatacattgagaagagtaaaagtccaccagcggaatttatgcgtatgattggcaatgacaaacaaggacagatgatcgtgttccatttgatagaacttttgaagaataatggaagattaccaagaccagatggatgcccagatgagatctatatgatcatgacagaatgctggaacaataatgtaaatcaacgcccctcctttagggatctagctcttcgagtggatcaaataagggataacatggctggatga

SEQ ID NO: 437 - DNA, 3399 bp, Homo sapiens
atgggaatggcctgccttacgatgacagaaatggagggaacatccacctcttctatatatcagaatggtgatatttctggaaatgccaattctatgaagcaaatagatccagttcttcaggtgtatctttaccattcccttgggaaatctgaggcagattatctgacctttccatctggggagtatgttgcagaagaaatctgtattgctgcttctaaagcttgtggtatcacacctgtgtatcataatatgtttgctttaatgagtgaaacagaaaggatctggtatccacccaaccatgtcttccatatagatgagtcaaccaggcataatgtactctacagaataagattttactttcctcgttggtattgcagtggcagcaacagagcctatcggcatggaatatctcgaggtgctgaagctcctcttcttgatgactttgtcatgtcttacctctttgctcagtggcggcatgattttgtgcacggatggataaaagtacctgtgactcatgaaacacaggaagaatgtcttgggatggcagtgttagatatgatgagaatagccaaagaaaacgatcaaaccccactggccatctataactctatcagctacaagacattcttaccaaaatgtattcgagcaaagatccaagactatcatattttgacaaggaagcgaataaggtacagatttcgcagatttattcagcaattcagccaatgcaaagccactgccagaaacttgaaacttaagtatcttataaatctggaaactctgcagtctgccttctacacagagaaatttgaagtaaaagaacctggaagtggtccttcaggtgaggagatttttgcaaccattataataactggaaacggtggaattcagtggtcaagagggaaacataaagaaagtgagacactgacagaacaggatttacagttatattgcgattttcctaatattattgatgtcagtattaagcaagcaaaccaagagggttcaaatgaaagccgagttgtaactatccataagcaagatggtaaaaatctggaaattgaacttagctcattaagggaagctttgtctttcgtgtcattaattgatggatattatagattaactgcagatgcacatcattacctctgtaaagaagtagcacctccagccgtgcttgaaaatatacaaagcaactgtcatggcccaatttcgatggattttgccattagtaaactgaagaaagcaggtaatcagactggactgtatgtacttcgatgcagtcctaaggactttaataaatattttttgacttttgctgtcgagcgagaaaatgtcattgaatataaacactgtttgattacaaaaaatgagaatgaagagtacaacctcagtgggacaaagaagaacttcagcagtcttaaagatcttttgaattgttaccagatggaaactgttcgctcagacaatataattttccagtttactaaatgctgtcccccaaagccaaaagataaatcaaaccttctagtcttcagaacgaatggtgtttctgatgtaccaacctcaccaacattacagaggcctactcatatgaaccaaatggtgtttcacaaaatcagaaatgaagatttgatatttaatgaaagccttggccaaggcacttttacaaagatttttaaaggcgtacgaagagaagtaggagactacagtcaactgcatgaaacagaagttcttttaaaagttctggataaagcacacagaaactattcagagtctttctttgaagcagcaagtatgatgagcaagctttctcacaagcatttggttttaaattatggagtatgtgtctgtggagacgagaatattctggttcaggagtttgtaaaatttggatcactagatacatatctgaaaaagaataaaaattgtataaatatattatggaaacttgaagttgctaaacagttggcatgggccatgcattttctagaagaaaacacccttattcatgggaatgtatgtgccaaaaatattctgcttatcagagaagaagacaggaagacaggaaatcctcctttcatcaaacttagtgatcctggcattagtattacagttttgccaaaggacattcttcaggagagaataccatgggtaccacctgaatgcattgaaaatcctaaaaatttaaatttggcaacagacaaatggagttttggtaccactttgtgggaaatctgcagtggaggagataaacctctaagtgctctggattctcaaagaaagctacaattttatgaagataggcatcagcttcctgcaccaaagtgggcagaattagcaaaccttataaataattgtatggattatgaaccagatttcaggccttctttcagagccatcatacgagatcttaacagtttgtttactccagattatgaactattaacagaaaatgacatgttaccaaatatgaggataggtgccctagggttttctggtgcctttgaagaccgggatcctacacagtttgaagagagacatttgaaatttctacagcaacttggcaagggtaattttgggagtgtggagatgtgccggtatgaccctctacaggacaacactggggaggtggtcgctgtaaaaaagcttcagcatagtactgaagagcacctaagagactttgaaagggaaattgaaatcctgaaatccctacagcatgacaacattgtaaagtacaagggagtgtgctacagtgctggtcggcgtaatctaaaattaattatggaatatttaccatatggaagtttacgagactatcttcaaaaacataaagaacggatagatcacataaaacttctgcagtacacatctcagatatgcaagggtatggagtatcttggtacaaaaaggtatatccacagggatctggcaacgagaaatatattggtggagaacgagaacagagttaaaattggagattttgggttaaccaaagtcttgccacaagacaaagaatactataaagtaaaagaacctggtgaaagtcccatattctggtatgctccagaatcactgacagagagcaagttttctgtggcctcagatgtttggagctttggagtggttctgtatgaacttttcacatacattgagaagagtaaaagtccaccagcggaatttatgcgtatgattggcaatgacaaacaaggacagatgatcgtgttccatttgatagaacttttgaagaataatggaagattaccaagaccagatggatgcccagatgagatctatatgatcatgacagaatgctggaacaataatgtaaatcaacgcccctcctttagggatctagctcttcgagtggatcaaataagggataacatggctggatga

SEQ ID NO: 438 - DNA, 3399 bp, Homo sapiens
atgggaatggcctgccttacgatgacagaaatggagggaacatccacctcttctatatatcagaatggtgatatttctggaaatgccaattctatgaagcaaatagatccagttcttcaggtgtatctttaccattcccttgggaaatctgaggcagattatctgacctttccatctggggagtatgttgcagaagaaatctgtattgctgcttctaaagcttgtggtatcacacctgtgtatcataatatgtttgctttaatgagtgaaacagaaaggatctggtatccacccaaccatgtcttccatatagatgagtcaaccaggcataatgtactctacagaataagattttactttcctcgttggtattgcagtggcagcaacagagcctatcggcatggaatatctcgaggtgctgaagctcctcttcttgatgactttgtcatgtcttacctctttgctcagtggcggcatgattttgtgcacggatggataaaagtacctgtgactcatgaaacacaggaagaatgtcttgggatggcagtgttagatatgatgagaatagccaaagaaaacgatcaaaccccactggccatctataactctatcagctacaagacattcttaccaaaatgtattcgagcaaagatccaagactatcatattttgacaaggaagcgaataaggtacagatttcgcagatttattcagcaattcagccaatgcaaagccactgccagaaacttgaaacttaagtatcttataaatctggaaactctgcagtctgccttctacacagagaaatttgaagtaaaagaacctggaagtggtccttcaggtgaggagatttttgcaaccattataataactggaaacggtggaattcagtggtcaagagggaaacataaagaaagtgagacactgacagaacaggatttacagttatattgcgattttcctaatattattgatgtcagtattaagcaagcaaaccaagagggttcaaatgaaagccgagttgtaactatccataagcaagatggtaaaaatctggaaattgaacttagctcattaagggaagctttgtctttcgtgtcattaattgatggatattatagattaactgcagatgcacatcattacctctgtaaagaagtagcacctccagccgtgcttgaaaatatacaaagcaactgtcatggcccaatttcgatggattttgccattagtaaactgaagaaagcaggtaatcagactggactgtatgtacttcgatgcagtcctaaggactttaataaatattttttgacttttgctgtcgagcgagaaaatgtcattgaatataaacactgtttgattacaaaaaatgagaatgaagagtacaacctcagtgggacaaagaagaacttcagcagtcttaaagatcttttgaattgttaccagatggaaactgttcgctcagacaatataattttccagtttactaaatgctgtcccccaaagccaaaagataaatcaaaccttctagtcttcagaacgaatggtgtttctgatgtaccaacctcaccaacattacagaggcctactcatatgaaccaaatggtgtttcacaaaatcagaaatgaagatttgatatttaatgaaagccttggccaaggcacttttacaaagatttttaaaggcgtacgaagagaagtaggagactacggtcaactgcatgaaacagaagttcttttaaaagttctggataaagcacacagaaactattcaaagtctttctttgaagcagcaagtatgatgagcaagctttctcacaagcatttggttttaaattatggagtatgtgtctgtggagacgagaatattctggttcaggagtttgtaaaatttggatcactagatacatatctgaaaaagaataaaaattgtataaatatattatggaaacttgaagttgctaaacagttggcatgggccatgcattttctagaagaaaacacccttattcatgggaatgtatgtgccaaaaatattctgcttatcagagaagaagacaggaagacaggaaatcctcctttcatcaaacttagtgatcctggcattagtattacagttttgccaaaggacattcttcaggagagaataccatgggtaccacctgaatgcattgaaaatcctaaaaatttaaatttggcaacagacaaatggagttttggtaccactttgtgggaaatctgcagtggaggagataaacctctaagtgctctggattctcaaagaaagctacaattttatgaagataggcatcagcttcctgcaccaaagtgggcagaattagcaaaccttataaataattgtatggattatgaaccagatttcaggccttctttcagagccatcatacgagatcttaacagtttgtttactccagattatgaactattaacagaaaatgacatgttaccaaatatgaggataggtgccctagggttttctggtgcctttgaagaccgggatcctacacagtttgaagagagacatttgaaatttctacagcaacttggcaagggtaattttgggagtgtggagatgtgccggtatgaccctctacaggacaacactggggaggtggtcgctgtaaaaaagcttcagcatagtactgaagagcacctaagagactttgaaagggaaattgaaatcctgaaatccctacagcatgacaacattgtaaagtacaagggagtgtgctacagtgctggtcggcgtaatctaaaattaattatggaatatttaccatatggaagtttacgagactatcttcaaaaacataaagaacggatagatcacataaaacttctgcagtacacatctcagatatgcaagggtatggagtatcttggtacaaaaaggtatatccacagggatctggcaacgagaaatatattggtggagaacgagaacagagttaaaattggagattttgggttaaccaaagtcttgccacaagacaaagaatactataaagtaaaagaacctggtgaaagtcccatattctggtatgctccagaatcactgacagagagcaagttttctgtggcctcagatgtttggagctttggagtggttctgtatgaacttttcacatacattgagaagagtaaaagtccaccagcggaatttatgcgtatgattggcaatgacaaacaaggacagatgatcgtgttccatttgatagaacttttgaagaataatggaagattaccaagaccagatggatgcccagatgagatctatatgatcatgacagaatgctggaacaataatgtaaatcaacgcccctcctttagggatctagctcttcgagtggatcaaataagggataacatggctggatga

SEQ ID NO: 439 - DNA, 3399 bp, Homo sapiens
atgggaatggcctgccttacgatgacagaaatggagggaacatccacctcttctatatatcagaatggtgatatttctggaaatgccaattctatgaagcaaatagatccagttcttcaggtgtatctttaccattcccttgggaaatctgaggcagattatctgacctttccatctggggagtatgttgcagaagaaatctgtattgctgcttctaaagcttgtggtatcacacctgtgtatcataatatgtttgctttaatgagtgaaacagaaaggatctggtatccacccaaccatgtcttccatatagatgagtcaaccaggcataatgtactctacagaataagattttactttcctcgttggtattgcagtggcagcaacagagcctatcggcatggaatatctcgaggtgctgaagctcctcttcttgatgactttgtcatgtcttacctctttgctcagtggcggcatgattttgtgcacggatggataaaagtacctgtgactcatgaaacacaggaagaatgtcttgggatggcagtgttagatatgatgagaatagccaaagaaaacgatcaaaccccactggccatctataactctatcagctacaagacattcttaccaaaatgtattcgagcaaagatccaagactatcatattttgacaaggaagcgaataaggtacagatttcgcagatttattcagcaattcagccaatgcaaagccactgccagaaacttgaaacttaagtatcttataaatctggaaactctgcagtctgccttctacacagagaaatttgaagtaaaagaacctggaagtggtccttcaggtgaggagatttttgcaaccattataataactggaaacggtggaattcagtggtcaagagggaaacataaagaaagtgagacactgacagaacaggatttacagttatattgcgattttcctaatattattgatgtcagtattaagcaagcaaaccaagagggttcaaatgaaagccgagttgtaactatccataagcaagatggtaaaaatctggaaattgaacttagctcattaagggaagctttgtctttcgtgtcattaattgatggatattatagattaactgcagatgcacatcattacctctgtaaagaagtagcacctccagccgtgcttgaaaatatacaaagcaactgtcatggcccaatttcgatggattttgccattagtaaactgaagaaagcaggtaatcagactggactgtatgtacttcgatgcagtcctaaggactttaataaatattttttgacttttgctgtcgagcgagaaaatgtcattgaatataaacactgtttgattacaaaaaatgagaatgaagagtacaacctcagtgggacaaagaagaacttcagcagtcttaaagatcttttgaattgttaccagatggaaactgttcgctcagacaatataattttccagtttactaaatgctgtcccccaaagccaaaagataaatcaaaccttctagtcttcagaacgaatggtgtttctgatgtaccaacctcaccaacattacagaggcctactcatatgaaccaaatggtgtttcacaaaatcagaaatgaagatttgatatttaatgaaagccttggccaaggcacttttacaaagatttttaaaggcgtacgaagagaagtaggagactacggtcaactgcatgaaacagaagttcttttaaaagttctggataaagcacacagaaactattcagagtctttctttgaagcagcaagtatgatgagcaagctttctcacaagcatttggttttaaattatggagtatgtgtctgtggagacgagaatattctggttcaggagtttgtaaaatttggatcactagatacatatctgaaaaagaataaaaattgtataaatatattatggaaacttgaagttgctaaacagttggcatgggccatgcattttctagaagaaaacacccttattcatgggaatgtatgtgccaaaaatattctgcttatcagagaagaagacaggaagacaggaaatcctcctttcatcaaacttagtgatcctggcattagtattacagttttgccaaaggacattcttcaggagagaataccatgggtaccacctgaatgcattgaaaatcctaaaaatttaaatttggcaacagacaaatggagttttggtaccactttgtgggaaatctgcagtggaggagataaacctctaagtgctctggattctcaaagaaagctacaattttatgaagataggcatcagcttcctgcaccaaagtgggcagaattagcaaaccttataaataattgtatggattatgaaccagatttcaggccttctttcagagccatcatacgagatcttaacagtttgtttactccagattatgaactattaacagaaaatgacatgttaccaaatatgaggataggtgccctagggttttctggtgcctttgaagaccgggatcctacacagtttgaagagagacatttgaaatttctacagcaacttggcaagggtaattttgggagtgtggagatgtgccggtatgaccctctacaggacaacactggggaggtggtcgctgtaaaaaagcttcagcatagtactgaagagcacctaagagactttgaaagggaaattgaaatcctgaaatccctacagcatgacaacattgtaaagtacaagggagtgtgctacagtgctggtcggcgtaatctaaaattaattatggaatatttaccatatggaagtttacgagactatcttcaaaaacataaagaacggatagatcacataaaacttctgcagtacacatctcagatatgcaagggtatggagtatcttggtacaaaaaggtatatccacagggatctggcaacgagaaatatattggtggagaacgagaacagagttaaaattggagattttgggttaaccaaagtcttgccacaagacaaagaatactataaagtaaaagaacctggtgaaagtcccatattctggtatgctccagaatcactgacagagagcaagttttctgtggcctcagatgtttggagctttggagtggttctgtatgaacttttcacatacattgagaagagtaaaagtccaccagcggaatttatgcatatgattggcaatgacaaacaaggacagatgatcgtgttccatttgatagaacttttgaagaataatggaagattaccaagaccagatggatgcccagatgagatctatatgatcatgacagaatgctggaacaataatgtaaatcaacgcccctcctttagggatctagctcttcgagtggatcaaataagggataacatggctggatga

SEQ ID NO: 440 - DNA, 3399 bp, Homo sapiens
atgggaatggcctgccttacgatgacagaaatggagggaacatccacctcttctatatatcagaatggtgatatttctggaaatgccaattctatgaagcaaatagatccagttcttcaggtgtatctttaccattcccttgggaaatctgaggcagattatctgacctttccatctggggagtatgttgcagaagaaatctgtattgctgcttctaaagcttgtggtatcacacctgtgtatcataatatgtttgctttaatgagtgaaacagaaaggatctggtatccacccaaccatgtcttccatatagatgagtcaaccaggcataatgtactctacagaataagattttactttcctcgttggtattgcagtggcagcaacagagcctatcggcatggaatatctcgaggtgctgaagctcctcttcttgatgactttgtcatgtcttacctctttgctcagtggcggcatgattttgtgcacggatggataaaagtacctgtgactcatgaaacacaggaagaatgtcttgggatggcagtgttagatatgatgagaatagccaaagaaaacgatcaaaccccactggccatctataactctatcagctacaagacattcttaccaaaatgtattcgagcaaagatccaagactatcatattttgacaaggaagcgaataaggtacagatttcgcagatttattcagcaattcagccaatgcaaagccactgccagaaacttgaaacttaagtatcttataaatctggaaactctgcagtctgccttctacacagagaaatttgaagtaaaagaacctggaagtggtccttcaggtgaggagatttttgcaaccattataataactggaaacggtggaattcagtggtcaagagggaaacataaagaaagtgagacactgacagaacaggatttacagttatattgcgattttcctaatattattgatgtcagtattaagcaagcaaaccaagagggttcaaatgaaagccgagttgtaactatccataagcaagatggtaaaaatctggaaattgaacttagctcattaagggaagctttgtctttcgtgtcattaattgatggatattatagattaactgcagatgcacatcattacctctgtaaagaagtagcacctccagccgtgcttgaaaatatacaaagcaactgtcatggcccaatttcgatggattttgccattagtaaactgaagaaagcaggtaatcagactggactgtatgtacttcgatgcagtcctaaggactttaataaatattttttgacttttgctgtcgagcgagaaaatgtcattgaatataaacactgtttgattacaaaaaatgagaatgaagagtacaacctcagtgggacaaagaagaacttcagcagtcttaaagatcttttgaattgttaccagatggaaactgttcgctcagacaatataattttccagtttactaaatgctgtcccccaaagccaaaagataaatcaaaccttctagtcttcagaacgaatggtgtttctgatgtaccaacctcaccaacattacagaggcctactcatatgaaccaaatggtgtttcacaaaatcagaaatgaagatttgatatttaatgaaagccttggccaaggcacttttacaaagatttttaaaggcgtacgaagagaagtaggagactacggtcaactgcatgaaacagaagttcttttaaaagttctggataaagcacacagaaactattcagagtctttctttgaagcagcaagtatgatgagcaagctttctcacaagcatttggttttaaattatggagtatgtgtctgtggagacgagaatattctggttcaggagtttgtaaaatttggatcactagatacatatctgaaaaagaataaaaattgtataaatatattatggaaacttgaagttgctaaacagttggcatgggccatgcattttctagaagaaaacacccttattcatgggaatgtatgtgccaaaaatattctgcttatcagagaagaagacaggaagacaggaaatcctcctttcatcaaacttagtgatcctggcattagtattacagttttgccaaaggacattcttcaggagagaataccatgggtaccacctgaatgcattgaaaatcctaaaaatttaaatttggcaacagacaaatggagttttggtaccactttgtgggaaatctgcagtggaggagataaacctctaagtgctctggattctcaaagaaagctacaattttatgaagataggcatcagcttcctgcaccaaagtgggcagaattagcaaaccttataaataattgtatggattatgaaccagatttcaggccttctttcagagccatcatacgagatcttaacagtttgtttactccagattatgaactattaacagaaaatgacatgttaccaaatatgaggataggtgccctagggttttctggtgcctttgaagaccgggatcctacacagtttgaagagagacatttgaaatttctacagcaacttggcaagggtaattttgggagtgtggagatgtgccggtatgaccctctacaggacaacactggggaggtggtcgctgtaaaaaagcttcagcatagtactgaagagcacctaagagactttgaaagggaaattgaaatcctgaaatccctacagcatgacaacattgtaaagtacaagggagtgtgctacagtgctggtcggcgtaatctaaaattaattatggaatatttaccatatggaagtttacgagactatcttcaaaaacataaagaacggatagatcacataaaacttctgcagtacacatctcagatatgcaagggtatggagtatcttggtacaaaaaggtatatccacagggatctggcaacgagaaatatattggtggagaacgagaacagagttaaaattggagattttgggttaaccaaagtcttgccacaagacaaagaatactataaagtaaaagaacctggtgaaagtcccatattctggtatgctccagaatcactgacagagagcaagttttctgtggcctcagatgtttggagctttggagtggttctgtatgaacttttcacatacattgagaagagtaaaagtccaccagcggaatttatgcgtatgattggcaatgacaaacaaggacagatgatcgtgttccatttgatagaacttttgaagaataatggaagattaccaagaccagatggatgcccagatgagatctatatgatcatgacagaatgctggaacagtaatgtaaatcaacgcccctcctttagggatctagctcttcgagtggatcaaataagggataacatggctggatga

SEQ ID NO: 441 - DNA, 3251 bp, Homo sapiens
atggcacctccaagtgaagagacgcccctgatccctcagcgttcatgcagcctcttgtccacggaggctggtgccctgcatgtgctgctgcccgctcggggccccgggcccccccagcgcctatctttctcctttggggaccacttggctgaggacctgtgcgtgcaggctgccaaggccagcgcttttacttccccaattggtttgggctggagaagtgccaccgcttcgggctacgcaaggatttggccagtgctatccttgacctgccagtcctggagcacctctttgcccagcaccgcagtgacctggtgagtgggcgcctccccgtgggcctcagtctcaaggagcagggtgagtgtctcagcctggccgtgttggacctggcccggatggcgcgagagcaggcccagcggccgggagagctgctgaagactgtcagctacaaggcctgcctacccccaagcctgcgcgacctgatccagggcctgagcttcgtgacgcggaggcgtattcggaggacggtgcgcagagccctgcgccgcgtggccgcctgccaggcagaccggcactcgctcatggccaagtacatcatggacctggagcggctggatccagccggggccgccgagaccttccacgtgggcctccctggggcccttggtggccacgacgggctggggctgctccgcgtggctggtgacggcggcatcgcctggacccagggagaacaggaggtcctccagcccttctgcgactttccagaaatcgtagacattagcatcaagcaggccccgcgcgttggcccggccggagagcaccgcctggtcactgttaccaggacagacaaccagattttagaggccgagttcccagggctgcccgaggctctgtcgttcgtggcgctcgtggacggctacttccggctgaccacggactcccagcacttcttctgcaaggaggtggcaccgccgaggctgctggaggaagtggccgagcagtgccacggccccatcactctggactttgccatcaacaagctcaagactgggggctcacgtcctggctcctatgttctccgccgcagcccccaggactttgacagcttcctcctcactgtctgtgtccagaacccccttggtcctgattataagggctgcctcatccggcgcagccccacaggaaccttccttctggttggcctcagccgaccccacagcagtcttcgagagctcctggcaacctgctgggatggggggctgcacgtagatggggtggcagtgaccctcacttcctgctgtatccccagacccaaagaaaagtccaacctgatcgtggtccagagaggtcacagcccacccacatcatccttggttcagccccaatcccaataccagctgagtcagatgacatttcacaagatccctgctgacagcctggagtggcatgagaacctgggccatgggtccttcaccaagatttaccggggctgtcgccatgaggtggtggatggggaggcccgaaagacagaggtgctgctgaaggtcatggatgccaagcacaagaactgcatggagtcattcctggaagcagcgagcttgatgagccaagtgtcgtaccggcatctcgtgctgctccacggcgtgtgcatggctggagacagcaccatggtgcaggaatttgtacacctgggggccatagacatgtatctgcgaaaacgtggccacctggtgccagccagctggaagctgcaggtggtcaaacagctggcctacgccctcaactatctggaggacaaaggcctgccccatggcaatgtctctgcccggaaggtgctcctggctcgggagggggctgatgggagcccgcccttcatcaagctgagtgaccctggggtcagccccgctgtgttaagcctggagatgctcaccgacaggatcccctgggtggcccccgagtgtctccgggaggcgcagacacttagcttggaagctgacaagtggggcttcggcgccacggtctgggaagtgtttagtggcgtcaccatgcccatcagtgccctggatcctgctaagaaactccaattttatgaggaccggcagcagctgccggcccccaagtggacagagctggccctgctgattcaacagtgcatggcctatgagccggtccagaggccctccttccgagccgtcattcgtgacctcaatagcctcatctcttcagactatgagctcctctcagaccccacacctggtgccctggcacctcgtgatgggctgtggaatggtgcccagctctatgcctgccaagaccccacgatcttcgaggagagacacctcaagtacatctcacagctgggcaagggcaactttggcagcgtggagctgtgccgctatgacccgctaggcgacaatacaggtgccctggtggccgtgaaacagctgcagcacagcgggccagaccagcagagggactttcagcgggagattcagatcctcaaagcactgcacagtgatttcattgtcaagtatcgtggtgtcagctatggcccgggccgccagagcctgcggctggtcatggagtacctgcccagcggctgcttgcgcgacttcctgcagcggcaccgcgcgcgcctcgatgccagccgcctccttctctattcctcgcagatctgcaagggcatggagtacctgggctcccgccgctgcgtgcaccgcgacctggccgcccgaaacatcctcgtggagagcgaggcacacgtcaagatcgctgacttcggcctagctaagctgctgccgcttgacaaagactactacgtggtccgcgagccaggccagagccccattttctggtatgcccccgaatccctctcggacaacatcttctctcgccagtcagacgtctggagcttcggggtcgtcctgtacgagctcttcacctactgcgacaaaagctgcagcccctcggccgagttcctgcggatgatgggatgtgagcgggatgtccccgccctctgccgcctcttggaactgctggaggagggccagaggctgccggcgcctcctgcctgccctgctgaggttcacgagctcatgaagctgtgctgggcccctagcccacaggaccggccatcattcagcgccctgggcccccagctggacatgctgtggagcggaagccgggggtgtgagactcatgccttcactgctcacccagagggcaaacaccactccctgtccttttcatag

SEQ ID NO: 442 - DNA, 3375 bp, Homo sapiens
atggcacctccaagtgaagagacgcccctgatccctcagcgttcatgcagcctcttgtccacggaggctggtgccctgcatgtgctgctgcccgctcggggccccgggcccccccagcgcctatctttctcctttggggaccacttggctgaggacctgtgcgtgcaggctgccaaggccagcggcatcctgcctgtgtaccactccctctttgctctggccacggaggacctgtcctgctggttccccccgagccacatcttctccgtggaggatgccagcacccaagtcctgctgtacaggattcgcttttacttccccaattggtttgggctggagaagtgccaccgcttcgggctacgcaaggatttggccagtgctatccttgacctgccagtcctggagcacctctttgcccagcaccgcagtgacctggtgagtgggcgcctccccgtgggcctcagtctcaaggagcagggtgagtgtctcagcctggccgtgttggacctggcccggatggcgcgagagcaggcccagcggccgggagagctgctgaagactgtcagctacaaggcctgcctacccccaagcctgcgcgacctgatccagggcctgagcttcgtgacgcggaggcgtattcggaggacggtgcgcagagccctgcgccgcgtggccgcctgccaggcagaccggcactcgctcatggccaagtacatcatggacctggagcggctggatccagccggggccgccgagaccttccacgtgggcctccctggggcccttggtggccacgacgggctggggctgctccgcgtggctggtgacggcggcatcgcctggacccagggagaacaggaggtcctccagcccttctgcgactttccagaaatcgtagacattagcatcaagcaggccccgcgcgttggcccggccggagagcaccgcctggtcactgttaccaggacagacaaccagattttagaggccgagttcccagggctgcccgaggctctgtcgttcgtggcgctcgtggacggctacttccggctgaccacggactcccagcacttcttctgcaaggaggtggcaccgccgaggctgctggaggaagtggccgagcagtgccacggccccatcactctggactttgccatcaacaagctcaagactgggggctcacgtcctggctcctatgttctccgccgcagcccccaggactttgacagcttcctcctcactgtctgtgtccagaacccccttggtcctgattataagggctgcctcatccggcgcagccccacaggaaccttccttctggttggcctcagccgaccccacagcagtcttcgagagctcctggcaacctgctgggatggggggctgcacgtagatggggtggcagtgaccctcacttcctgctgtatccccagacccaaagaaaagtccaacctgatcgtggtccagagaggtcacagcccacccacatcatccttggttcagccccaatcccaataccagctgagtcagataacatttcacaagatccctgctgacagcctggagtggcatgagaacctgggccatgggtccttcaccaagatttaccggggctgtcgccatgaggtggtggatggggaggcccgaaagacagaggtgctgctgaaggtcatggatgccaagcacaagaactgcatggagtcattcctggaagcagcgagcttgatgagccaagtgtcgtaccggcatctcgtgctgctccacggcgtgtgcatggctggagacagcaccatggtgcaggaatttgtacacctgggggccatagacatgtatctgcgaaaacgtggccacctggtgccagccagctggaagctgcaggtggtcaaacagctggcctacgccctcaactatctggaggacaaaggcctgccccatggcaatgtctctgcccggaaggtgctcctggctcgggagggggctgatgggagcccgcccttcatcaagctgagtgaccctggggtcagccccgctgtgttaagcctggagatgctcaccgacaggatcccctgggtggcccccgagtgtctccgggaggcgcagacacttagcttggaagctgacaagtggggcttcggcgccacggtctgggaagtgtttagtggcgtcaccatgcccatcagtgccctggatcctgctaagaaactccaattttatgaggaccggcagcagctgccggcccccaagtggacagagctggccctgctgattcaacagtgcatggcctatgagccggtccagaggccctccttccgagccgtcattcgtgacctcaatagcctcatctcttcagactatgagctcctctcagaccccacacctggtgccctggcacctcgtgatgggctgtggaatggtgcccagctctatgcctgccaagaccccacgatcttcgaggagagacacctcaagtacatctcacagctgggcaagggcaactttggcagcgtggagctgtgccgctatgacccgctaggcgacaatacaggtgccctggtggccgtgaaacagctgcagcacagcgggccagaccagcagagggactttcagcgggagattcagatcctcaaagcactgcacagtgatttcattgtcaagtatcgtggtgtcagctatggcccgggccgccagagcctgcggctggtcatggagtacctgcccagcggctgcttgcgcgacttcctgcagcggcaccgcgcgcgcctcgatgccagccgcctccttctctattcctcgcagatctgcaagggcatggagtacctgggctcccgccgctgcgtgcaccgcgacctggccgcccgaaacatcctcgtggagagcgaggcacacgtcaagatcgctgacttcggcctagctaagctgctgccgcttgacaaagactactacgtggtccgcgagccaggccagagccccattttctggtatgcccccgaatccctctcggacaacatcttctctcgccagtcagacgtctggagcttcggggtcgtcctgtacgagctcttcacctactgcgacaaaagctgcagcccctcggccgagttcctgcggatgatgggatgtgagcgggatgtccccgccctctgccgcctcttggaactgctggaggagggccagaggctgccggcgcctcctgcctgccctgctgaggttcacgagctcatgaagctgtgctgggcccctagcccacaggaccggccatcattcagcgccctgggcccccagctggacatgctgtggagcggaagccgggggtgtgagactcatgccttcactgctcacccagagggcaaacaccactccctgtccttttcatag

SEQ ID NO: 443 - DNA, 3375 bp, Homo sapiens
atggcacctccaagtgaagagacgcccctgatccctcagcgttcatgcagcctcttgtccacggaggctggtgccctgcatgtgctgctgcccgctcggggccccgggcccccccagcgcctatctttctcctttggggaccacttggctgaggacctgtgcgtgcaggctgccaaggccagcggcatcctgcctgtgtaccactccctctttgctctggccacggaggacctgtcctgctggttccccccgagccacatcttctccgtggaggatgccagcacccaagtcctgctgtacaggattcgcttttacttccccaattggtttgggctggagaagtgccaccgcttcgggctacgcaaggatttggccagtgctatccttgacctgccagtcctggagcacctctttgcccagcaccgcagtgacctggtgagtgggcgcctccccgtgggcctcagtctcaaggagcagggtgagtgtctcagcctggccgtgttggacctggcccggatggcgcgagagcaggcccagcggccgggagagctgctgaagactgtcagctacaaggcctgcctacccccaagcctgcgcgacctgatccagggcctgagcttcgtgacgcggaggcgtattcggaggacggtgcgcagagccctgcgccgcgtggccgcctgccaggcagaccggcactcgctcatggccaagtacatcatggacctggagcggctggatccagccggggccgccgagaccttccacgtgggcctccctggggcccttggtggccacgacgggctggggctgctccgcgtggctggtgacggcggcatcgcctggacccagggagaacaggaggtcctccagcccttctgcgactttccagaaatcgtagacattagcatcaagcaggccccgcgcgttggcccggccggagagcaccgcctggtcactgttaccaggacagacaaccagattttagaggccgagttcccagggctgcccgaggctctgtcgttcgtggcgctcgtggacggctacttccggctgaccacggactcccagcacttcttctgcaaggaggtggcaccgccgaggctgctggaggaagtggccgagcagtgccacggccccatcactctggactttgccatcaacaagctcaagactgggggctcacgtcctggctcctatgttctccgccgcagcccccaggactttgacagcttcctcctcactgtctgtgtccagaacccccttggtcctgattataagggctgcctcatccggcgcagccccacaggaaccttccttctggttggcctcagccgaccccacagcagtcttcgagagctcctggcaacctgctgggatggggggctgcacgtagatggggtggcagtgaccctcacttcctgctgtatccccagacccaaagaaaagtccaacctgatcgtggtccagagaggtcacagcccacccacatcatccttggttcagccccaatcccaataccagctgagtcagatgacatttcacaagatccctgctgacagcctggagtggcatgagaacctgggccatgggtccttcaccaagatttaccggggctgtcgccatgaggtggtggatggggaggcccgaaagacagaggtgctgctgaaggtcatggatgccaagcacaagaactgcatggagtcattcctggaagcagcgagcttgatgagccaagtgtcgtaccggcatctcgtgctgctccacggcgtgtgcatggctggagacagcaccatggtgcaggaatttgtacacctgggggccatagacatgtatctgcgaaaacgtggccacctggtgccagccagctggaagctgcaggtggtcaaacagctggcctacgccctcaactatctggaggacaaaggcctgccccatggcaatgtctctgcccggaaggtgctcctggctcgggagggggctgatgggagcccgcccttcatcaagctgagtgaccctggggtcagccccgctgtgttaagcctggagatgctcaccgacaggatcccctgggtggccctcgagtgtctccgggaggcgcagacacttagcttggaagctgacaagtggggcttcggcgccacggtctgggaagtgtttagtggcgtcaccatgcccatcagtgccctggatcctgctaagaaactccaattttatgaggaccggcagcagctgccggcccccaagtggacagagctggccctgctgattcaacagtgcatggcctatgagccggtccagaggccctccttccgagccgtcattcgtgacctcaatagcctcatctcttcagactatgagctcctctcagaccccacacctggtgccctggcacctcgtgatgggctgtggaatggtgcccagctctatgcctgccaagaccccacgatcttcgaggagagacacctcaagtacatctcacagctgggcaagggcaactttggcagcgtggagctgtgccgctatgacccgctaggcgacaatacaggtgccctggtggccgtgaaacagctgcagcacagcgggccagaccagcagagggactttcagcgggagattcagatcctcaaagcactgcacagtgatttcattgtcaagtatcgtggtgtcagctatggcccgggccgccagagcctgcggctggtcatggagtacctgcccagcggctgcttgcgcgacttcctgcagcggcaccgcgcgcgcctcgatgccagccgcctccttctctattcctcgcagatctgcaagggcatggagtacctgggctcccgccgctgcgtgcaccgcgacctggccgcccgaaacatcctcgtggagagcgaggcacacgtcaagatcgctgacttcggcctagctaagctgctgccgcttgacaaagactactacgtggtccgcgagccaggccagagccccattttctggtatgcccccgaatccctctcggacaacatcttctctcgccagtcagacgtctggagcttcggggtcgtcctgtacgagctcttcacctactgcgacaaaagctgcagcccctcggccgagttcctgcggatgatgggatgtgagcgggatgtccccgccctctgccgcctcttggaactgctggaggagggccagaggctgccggcgcctcctgcctgccctgctgaggttcacgagctcatgaagctgtgctgggcccctagcccacaggaccggccatcattcagcgccctgggcccccagctggacatgctgtggagcggaagccgggggtgtgagactcatgccttcactgctcacccagagggcaaacaccactccctgtccttttcatag

SEQ ID NO: 444 - DNA, 3375 bp, Homo sapiens
atggcacctccaagtgaagagacgcccctgatccctcagcgttcatgcagcctcttgtccacggaggctggtgccctgcatgtgctgctgcccgctcggggccccgggcccccccagcgcctatctttctcctttggggaccacttggctgaggacctgtgcgtgcaggctgccaaggccagcggcatcctgcctgtgtaccactccctctttgctctggccacggaggacctgtcctgctggttccccccgagccacatcttctccgtggaggatgccagcacccaagtcctgctgtacaggattcgcttttacttccccaattggtttgggctggagaagtgccaccgcttcgggctacgcaaggatttggccagtgctatccttgacctgccagtcctggagcacctctttgcccagcaccgcagtgacctggtgagtgggcgcctccccgtgggcctcagtctcaaggagcagggtgagtgtctcagcctggccgtgttggacctggcccggatggcgcgagagcaggcccagcggccgggagagctgctgaagactgtcagctacaaggcctgcctacccccaagcctgcgcgacctgatccagggcctgagcttcgtgacgcggaggcgtattcggaggacggtgcgcagagccctgcgccgcgtggccgcctgccaggcagaccggcactcgctcatggccaagtacatcatggacctggagcggctggatccagccggggccgccgagaccttccacgtgggcctccctggggcccttggtggccacgacgggctggggctgctccgcgtggctggtgacggcggcatcgcctggacccagggagaacaggaggtcctccagcccttctgcgactttccagaaatcgtagacattagcatcaagcaggccccgcgcgttggcccggccggagagcaccgcctggtcactgttaccaggacagacaaccagattttagaggccgagttcccagggctgcccgaggctctgtcgttcgtggcgctcgtggacggctacttccggctgaccacggactcccagcacttcttctgcaaggaggtggcaccgccgaggctgctggaggaagtggccgagcagtgccacggccccatcactctggactttgccatcaacaagctcaagactgggggctcacgtcctggctcctatgttctccgccgcagcccccaggactttgacagcttcctcctcactgtctgtgtccagaacccccttggtcctgattataagggctgcctcatccggcgcagccccacaggaaccttccttctggttggcctcagccgaccccacagcagtcttcgagagctcctggcaacctgctgggatggggggctgcacgtagatggggtggcagtgaccctcacttcctgctgtatccccagacccaaagaaaagtccaacctgatcgtggtccagagaggtcacagcccacccacatcatccttggttcagccccaatcccaataccagctgagtcagatgacatttcacaagatccctgctgacagcctggagtggcatgagaacctgggccatgggtccttcaccaagatttaccggggctgtcgccatgaggtggtggatggggaggcccgaaagacagaggtgctgctgaaggtcatggatgccaagcacaagaactgcatggagtcattcctggaagcagcgagcttgatgagccaagtgtcgtaccggcatctcgtgctgctccacggcgtgtgcatggctggagacagcaccatggtgcaggaatttgtacacctgggggccatagacatgtatctgcgaaaacgtggccacctggtgccagccagctggaagctgcaggtggtcaaacagctggcctacgccctcaactatctggaggacaaaggcctgccccatggcaatgtctctgcccggaaggtgctcctggctcgggagggggctgatgggagcccgcccttcatcaagctgagtgaccctggggtcagccccgctgtgttaagcctggagatgctcaccgacaggatcccctgggtggcccccgagtgtctccggaaggcgcagacacttagcttggaagctgacaagtggggcttcggcgccacggtctgggaagtgtttagtggcgtcaccatgcccatcagtgccctggatcctgctaagaaactccaattttatgaggaccggcagcagctgccggcccccaagtggacagagctggccctgctgattcaacagtgcatggcctatgagccggtccagaggccctccttccgagccgtcattcgtgacctcaatagcctcatctcttcagactatgagctcctctcagaccccacacctggtgccctggcacctcgtgatgggctgtggaatggtgcccagctctatgcctgccaagaccccacgatcttcgaggagagacacctcaagtacatctcacagctgggcaagggcaactttggcagcgtggagctgtgccgctatgacccgctaggcgacaatacaggtgccctggtggccgtgaaacagctgcagcacagcgggccagaccagcagagggactttcagcgggagattcagatcctcaaagcactgcacagtgatttcattgtcaagtatcgtggtgtcagctatggcccgggccgccagagcctgcggctggtcatggagtacctgcccagcggctgcttgcgcgacttcctgcagcggcaccgcgcgcgcctcgatgccagccgcctccttctctattcctcgcagatctgcaagggcatggagtacctgggctcccgccgctgcgtgcaccgcgacctggccgcccgaaacatcctcgtggagagcgaggcacacgtcaagatcgctgacttcggcctagctaagctgctgccgcttgacaaagactactacgtggtccgcgagccaggccagagccccattttctggtatgcccccgaatccctctcggacaacatcttctctcgccagtcagacgtctggagcttcggggtcgtcctgtacgagctcttcacctactgcgacaaaagctgcagcccctcggccgagttcctgcggatgatgggatgtgagcgggatgtccccgccctctgccgcctcttggaactgctggaggagggccagaggctgccggcgcctcctgcctgccctgctgaggttcacgagctcatgaagctgtgctgggcccctagcccacaggaccggccatcattcagcgccctgggcccccagctggacatgctgtggagcggaagccgggggtgtgagactcatgccttcactgctcacccagagggcaaacaccactccctgtccttttcatag

SEQ ID NO: 445 - DNA, 1530 bp, Homo sapiens
atgggctgtggctgcagctcacacccggaagatgactggatggaaaacatcgatgtgtgtgagaactgccattatcccatagtcccactggatggcaagggcacgctgctcatccgaaatggctctgaggtgcgggacccactggttacctacgaaggctccaatccgccggcttccccactgcaagacaacctggttatcgctctgcacagctatgagccctctcacgacggagatctgggctttgagaagggggaacagctccgcatcctggagcagagcggcgagtggtggaaggcgcagtccctgaccacgggccaggaaggcttcatccccttcaattttgtggccaaagcgaacagcctggagcccgaaccctggttcttcaagaacctgagccgcaaggacgcggagcggcagctcctggcgcccgggaacactcacggctcctccctcatccgggagagcgagagcaccgcgggatcgttttcactgtcggtccgggacttcgaccagaaccagggagaggtggtgaaacattacaagatccgtaatctggacaacggtggcttctacatctcccctcgaatcacttttcccggcctgcatgaactggtccgccattacaccaatgcttcagatgggctgtgcacacggttgagccgcccctgccagacccagaagccccagaagccgtggtgggaggacgagtgggaggttcccagggagacgctgaagctggtggagcggctgggggctggacagttcggggaggtgtggatggggtactacaacgggcacacgaaggtggcggtgaagagcctgaagcagggcagcatgtccccggacgccttcctggccgaggccaacctcatgaagcagctgcaacaccagcggctggttcggctctacgctgtggtcacccaggagcccatctacatcatcactgaatacatggagaatgggagtctagtggattttctcaagaccccttcaggcatcaagttgaccatcaacaaactcctggacatggcagcccaaattgcagaaggcatggcattcattgaagagcggaattatattcatcgtgaccttcgggctgccaacattctggtgtctgacaccctgagctgcaagattgcagactttggcctagcacgcctcattgaggacaacgagtacacagccagggagggggccaagtttcccattaagtggacagcgccagaagccattaactacgggacattcaccatcaagtcagatgtgtggtcttttgggatcctgctgacggaaattgtcacccacggccgcatcccttacccagggatgaccaacccggaggtgattcagaacctggagcgaggctaccgcatggtgcgccctgacaactgtccagaggagctgtaccaactcatgaggctgtgctggaaggagcgcccagaggaccggcccacctttgactacctgcgcagtgtgctggaggacttcttcacggccacagagggccagtaccagcctcagccttga

SEQ ID NO: 446 - DNA, 1530 bp, Homo sapiens
atgggctgtggctgcagctcacacccggaagatgactggatggaaaacatcgatgtgtgtgagaactgccattatcccatagtcccactggatggcaagggcacgctgctcatccgaaatggctctgaggtgcgggacccactggttacctacgaaggctccaatccgccggcttccccactgcaagacaacctggttatcgctctgcacagctatgagccctctcacgacggagatctgggctttgagaagggggaacagctccgcatcctggagcagagcggcgagtggtggaaggcgcagtccctgaccacgggccaggaaggcttcatccccttcaattttgtggccaaagcgaacagcctggagcccgaaccctggttcttcaagaacctgagccgcaaggacgcggagcggcagctcctggcgcccgggaacactcacggctccttcctcatccgggagagcgagagcaccgcgggatcgttttcactgtcggtccgggacttcgaccagaaccagggagaggtggtgaaacattacaagatccgtaatctggacaacggtggcttctacatctcccctcgaatcacttttcccggcctgcatgaactggtccgccattacaccaatgcttcagatgggctgtgcacacggttgagccgcccctgccagacccagaagccccagaagccgtggtgggaggacgagtgggaggttcccagggagacgctgaagctggtggagcggctgggggctggacagttcggggaggtgtggatggggtactacaacgggcacacgaaggtggcggtgaagagcctgaagcagggcagcatgtccccggacgccttcctggccgaggccaacctcatgaagcagctgcaacaccagcggctggttcggctctacgctgtggtcacccaggagcccatctacatcatcactgaatacatggagaatgggagtctagtggattttctcaagaccccttcaggcatcaagttgaccatcaacaaactcctggacatggcagcccaaattgcagaaggcatggcattcattgaagagcggaattatattcatcgtgaccttcgggctgccaacattctggtgtctgacaccctgagctgcaagattgcagactttggcctagcacgcctcattgaggacaacgagtacacagccagggagggggccaagtttcccattaagtggacagcgccagaagccattaactacgggacattcaccatcaagtcagatgtgtggtcttttgggatcctgctgacggaaattgtcacccacggccgcatcccttacccagggatgaccaacccggaggtgattcagaacctggagcgaggctaccgcatggtgcgccctgacaactgtccagaggagctgtaccaactcatgaggctgtgctggaaggagcgcccagaggactggcccacctttgactacctgcgcagtgtgctggaggacttcttcacggccacagagggccagtaccagcctcagccttga

SEQ ID NO: 447 - DNA, 1659 bp, Homo sapiens
atgggctgtggctgcagctcacacccggaagatgactggatggaaaacatcgatgtgtgtgagaactgccattatcccatagtcccactggatggcaagggcacaggcgacgggcctttgggagggtaagaatgcaaccagaagaatgaccgcctacagccttgaaagaagagtggcctctccctgaaatacaaaggaaaacccagagaggggaaggaatctcctaagatccagctgctcatccgaaatggctctgaggtgcgggacccactggttacctacgaaggctccaatccgccggcttccccactgcaagacaacctggttatcgctctgcacagctatgagccctctcacgacggagatctgggctttgagaagggggaacagctccgcatcctggagcagagcggcgagtggtggaaggcgcagtccctgaccacgggccaggaaggcttcatccccttcaattttgtggccaaagcgaacagcctggagcccgaaccctggttcttcaagaacctgagccgcaaggacgcggagcggcagctcctggcgcccgggaacactcacggctccttcctcatccgggagagcgagagcaccgcgggatcgttttcactgtcggtccgggacttcgaccagaaccagggagaggtggtgaaacattacaagatccgtaatctggacaacggtggcttctacatctcccctcgaatcacttttcccggcctgcatgaactggtccgccattacaccaatgcttcagatgggctgtgcacacggttgagccgcccctgccagacccagaagccccagaagccgtggtgggaggacgagtgggaggttcccagggagacgctgaagctggtggagcggctgggggctggacagttcggggaggtgtggatggggtactacaacgggcacacgaaggtggcggtgaagagcctgaagcagggcagcatgtccccggacgccttcctggccgaggccaacctcatgaagcagctgcaacaccagcggctggttcggctctacgctgtggtcacccaggagcccatctacatcatcactgaatacatggagaatgggagtctagtggattttctcaagaccccttcaggcatcaagttgaccatcaacaaactcctggacatggcagcccaaattgcagaaggcatggcattcattgaagagcggaattatattcatcgtgaccttcgggctgccaacattctggtgtctgacaccctgagctgcaagattgcagactttggcctagcacgcctcattgaggacaacgagtacacagccagggagggggccaagtttcccattaagtggacagcgccagaagccattaactacgggacattcaccatcaagtcagatgtgtggtcttttgggatcctgctgacggaaattgtcacccacggccgcatcccttacccagggatgaccaacccggaggtgattcagaacctggagcgaggctaccgcatggtgcgccctgacaactgtccagaggagctgtaccaactcatgaggctgtgctggaaggagcgcccagaggaccggcccacctttgactacctgcgcagtgtgctggaggacttcttcacggccacagagggccagtaccagcctcagccttga

SEQ ID NO: 448 - DNA, 4512 bp, Homo sapiens
atgccggggccgccggcgttgcggcggaggctgctgctgctgctgctggtcctcctgatcgccggcagtgctggggccgcgccacttccgcaaacaggtgcaggggaggcgccacctgctgcagaagtttcctcatcttttgtgatcctgtgtgtgtgcagtttaataatattaatagtgttaattgcaaactgtgtatcctgctgtaaggacccagaaatagactttaaggaatttgaagataattttgatgatgagatagatttcacaccaccagcagaagacactccctctgttcagtccccagcagaggtcttcacactttcagtaccaaatatttcactcccagctccctcgcaattccagccttctgtagagggattgaagtctcaagttgcccgccacagtctaaactacatacaggaaattggaaatggctggtttggaaaggttctcttgggagagatttacacgggcactagcgtagcaagagtcatcgtgaaggagttaaaagcaagtgccaacccaaaggaacaagatacttttttgaaaaatggagaaccttactacattcttcagcatccaaatattcttcagtgtgttggacagtgcgtagaagcgattccctacctcctggtgtttgagttctgtgacttgggtgacctgaaggcgtatctgcgcagcgagcaggagcacatgcggggggactcaccgaccatgctgctgcagaggatggcgtgcgaggtcgccgcggggctggccgccatgcacaagctgcacttcctgcacagtgatttagccctgcggaattgttttctcacctccgacttaaatgtgaaagtgggagattacggaataggattcagcaggtacaaggaggattatattgaaacagatgataaaaaagttttccctctgcgatggactgctccagaattagtaaccagctttcaagacagactgctaactgcagatcagactaagtatagtaatatctggtctctgggtgtgacactttgggagctttttgacaatgccgcacagccgtattcaaacctttccaacttagatgtcctcaaccaagtcattagagagagagacacaaaactcccgaagccccagctggagcagccctactctgatagatggtatgaagtcttacagttctgttggctgtcaccagaaaagagacccgcggctgaagatgtgcacaggctgctgacttacctgcggctgcagagccagcgggactcagaggtcgactttgaacagcagtggaacgctctgaagccgaacacaaacagcagagactcctccaacaatgctgcattcccaattctcgaccactttgccagggaccggctgggtcgtgaaatggaggaagtcctcaccgtgaccgaaaccagccagggcctgagcttcgagtatgtctgggaggccgctaagcacgaccactttgacgagcgcagccggggccacctggacgaaggcttgtcctacacgagcatcttctatccggttgaagtttttgagagttcgctttcagatcctgggcccggaaagcaagatgacagcggccaggatgtccccctgagggtccctggagtggttcctgtttttgatgcccacaacctttctgttggaagcgactattatatccagttagaagaaaaaagtggtagtaacttggagcttgattacccaccagcgctgctcacaaccgacatggataatccagaaaggactggccctgaactgtcccagctcacggcgctcaggagcgttgaacttgaggagtccagtacagatgaggacttcttccaaagcagtacagaccccaaagactctagcttaccaggggacttacacgtgaccagtggccccgagagccctttcaacaatatatttaatgatgtggacaaatcggaagatttgcccagtcaccaaaaaatattcgacttaatggaattaaacggagttcaagccgactttaaacctgccactttaagttccagtttggataaccccaaagagtcagtcataacaggccactttgagaaagaaaagccccgtaagatttttgacagtgagcctctctgcctatcagataatcttatgcaccaagataattttgatccattgaatgttcaagaattgtcagaaaactttttatttcttcaagagaaaaacttactaaaaggctcattgtccagcaaagaacacataaatgatcttcagacagaacttaagaatgctggttttactgaagctatgttagaaacgtcatgtagaaactctttagatactgagcttcagtttgctgaaaataagccaggcttgtctttgttgcaggaaaacgtaagcacaaagggtgacgatacagatgtcatgctcacaggtgacactttgagcacctcattgcagtcttccccggaagtgcaggtacctcctacctccttcgaaacagaagaaacgccccgtcgggtacccccagactcactcccaacacagggagaaacccagcccacgtgtttagatgttattgtcccggaggactgtctccaccaggacatcagtccagacgctgtgactgtcccggttgaaattctctcaactgatgccagaacccacagcctggataacaggtcccaggactctcctggcgagagtgaggagaccctgcgactcaccgaaagtgactctgttcttgctgatgacatccttgccagcagggtgagtgtagggagtagtctcccggaactgggacaggaattgcacaataaaccattttcggaagaccatcacagtcatcgccggctagagaaaaacttagaggctgtggagactttaaatcagctcaattctaaagacgcagcaaaagaagcaggcttggtgtctgccctctcctcggactcaaccagtcaggacagcctcctggaggacagcttgtcagcacccttcccagcctctgagccgtccctggaaaccccggactctctggagtcagtggatgtccacgaagcgctactggactctttaggatctcacactccccagaaactagtgccccccgataagccggcagacagtggctacgaaacagagaacttggagtctcccgagtggaccttgcatcccgctcccgagggcaccgcagactcagaaccagccaccacgggcgatggcggccacagcggtctgcctcccaacccggtcattgtcatctcagatgccggcgatggtcacagaggcacagaagtgacccctgagacgttcacagctggctcccagggttcataccgagactctgcgtacttctcagacaatgactctgagcccgagaaaaggtctgaggaggtcccgggaacctccccatccgccttggtgttggtacaggagcagcccctacccgagccagtcctccccgagcaaagtcctgctgcccaggatagctgcctggaagccagaaagagccagccagatgaaagttgtctgtctgctttgcacaactccagtgacctggaattaagagccacgccggagccagcacagactggtgttccccagcaggtgcatcccacggaagacgaggccagcagtccctggagtgtgctgaatgcagaacttagcagcggcgatgacttcgagacacaggacgatcgcccctgcaccctcgcttccacggggaccaacacgaacgaactccttgcctacaccaattctgcgctggacaagtccctgtccagccactccgagggcccgaagttgaaggagccggacatcgaagggaagtacctggggaaactcggggtgtcagggatgctcgacctctcagaggacgggatggatgcagacgaggaggacgaaaacagcgacgactcggacgaggacctgcgggccttcaacctgcatagcctcagctccgagtcggaggacgagaccgagcaccccgtgcccatcatcctcagcaacgaggacggaaggcacctgcggagtctgttgaagcccacagcggccaatgcccccgacccactgcccgaggactggaagaaggaaaagaaggcagtcacgtttttcgatgatgtcacagtctacctgtttgaccaggagaccccaaccaaagagctggggccctgtggaggagaggcgtgcggcccggacctgagcggcccagccccagcctcaggctctccctacctgagcaggtgcatcaactccgaaagctccaccgacgaagaaggtggtggctttgagtgggatgatgacttctccccagatccttttatgtcaaagacaacaagtaacctgctcagctccaagccttctctccaaacatccaagtacttttctccgccgccaccggcccggagcacggagcagagctggccgcactcggcgccttactcccggttctccatctctcccgccaacattgccagcttttccctcacacacctgaccgactcggacatcgagcagggcggaagcagcgaagacggagaaaaggactag

SEQ ID NO: 449 - DNA, 4512 bp, Homo sapiens
atgccggggccgccggcgttgcggcggaggctgctgctgctgctgctggtcctcctgatcgccggcagtgctggggccgcgccacttccgcaaacaggtgcaggggaggcgccacctgctgcagaagtttcctcatcttttgtgatcctgtgtgtgtgcagtttaataatattaatagtgttaattgcaaactgtgtatcctgctgtaaggacccagaaatagactttaaggaatttgaagataattttgatgatgagatagatttcacaccaccagcagaagacactccctctgttcagtccccagcagaggtcttcacactttcagtaccaaatatttcactcccagctccctcgcaattccagccttctgtagagggattgaagtctcaagttgcccgccacagtctaaactacatacaggaaattggaaatggctggtttggaaaggttctcttgggagagatttacacgggcactagcgtagcaagagtcatcgtgaaggagttaaaagcaagtgccaacccaaaggaacaagatacttttttgaaaaatggagaaccttactacattcttcagcatccaaatattcttcagtgtgttggacagtgcgtagaagcgattccctacctcctggtgtttgagttctgtgacttgggtgacctgaaggcgtatctgcgcagcgagcaggagcacatgcggggggactcacagaccatgctgctgcagaggatggcgtgcgaggtcgccacggggctggccgccatgcacaagctgcacttcctgcacagtgatttagccctgcggaattgttttctcacctccgacttaaatgtgaaagtgggagattacggaataggattcagcaggtacaaggaggattatattgaaacagatgataaaaaagttttccctctgcgatggactgctccagaattagtaaccagctttcaagacagactgctaactgcagatcagactaagtatagtaatatctggtctctgggtgtgacactttgggagctttttgacaatgccgcacagccgtattcaaacctttccaacttagatgtcctcaaccaagtcattagagagagagacacaaaactcccgaagccccagctggagcagccctactctgatagatggtatgaagtcttacagttctgttggctgtcaccagaaaagagacccgcggctgaagatgtgcacaggctgctgacttacctgcggctgcagagccagcgggactcagaggtcgactttgaacagcagtggaacgctctgaagccgaacacaaacagcagagactcctccaacaatgctgcattcccaattctcgaccactttgccagggaccggctgggtcgtgaaatggaggaagtcctcaccgtgaccgaaaccagccagggcctgagcttcgagtatgtctgggaggccgctaagcacgaccactttgacgagcgcagccggggccacctggacgaaggcttgtcctacacgagcatcttctatccggttgaagtttttgagagttcgctttcagatcctgggcccggaaagcaagatgacagcggccaggatgtccccctgagggtccctggagtggttcctgtttttgatgcccacaacctttctgttggaagcgactattatatccagttagaagaaaaaagtggtagtaacttggagcttgattacccaccagcgctgctcacaaccgacatggataatccagaaaggactggccctgaactgtcccagctcacggcgctcaggagcgttgaacttgaggagtccagtacagatgaggacttcttccaaagcagtacagaccccaaagactctagcttaccaggggacttacacgtgaccagtggccccgagagccctttcaacaatatatttaatgatgtggacaaatcggaagatttgcccagtcaccaaaaaatattcgacttaatggaattaaacggagttcaagccgactttaaacctgccactttaagttccagtttggataaccccaaagagtcagtcataacaggccactttgagaaagaaaagccccgtaagatttttgacagtgagcctctctgcctatcagataatcttatgcaccaagataattttgatccattgaatgttcaagaattgtcagaaaactttttatttcttcaagagaaaaacttactaaaaggctcattgtccagcaaagaacacataaatgatcttcagacagaacttaagaatgctggttttactgaagctatgttagaaacgtcatgtagaaactctttagatactgagcttcagtttgctgaaaataagccaggcttgtctttgttgcaggaaaacgtaagcacaaagggtgacgatacagatgtcatgctcacaggtgacactttgagcacctcattgcagtcttccccggaagtgcaggtacctcctacctccttcgaaacagaagaaacgccccgtcgggtacccccagactcactcccaacacagggagaaacccagcccacgtgtttagatgttattgtcccggaggactgtctccaccaggacatcagtccagacgctgtgactgtcccggttgaaattctctcaactgatgccagaacccacagcctggataacaggtcccaggactctcctggcgagagtgaggagaccctgcgactcaccgaaagtgactctgttcttgctgatgacatccttgccagcagggtgagtgtagggagtagtctcccggaactgggacaggaattgcacaataaaccattttcggaagaccatcacagtcatcgccggctagagaaaaacttagaggctgtggagactttaaatcagctcaattctaaagacgcagcaaaagaagcaggcttggtgtctgccctctcctcggactcaaccagtcaggacagcctcctggaggacagcttgtcagcacccttcccagcctctgagccgtccctggaaaccccggactctctggagtcagtggatgtccacgaagcgctactggactctttaggatctcacactccccagaaactagtgccccccgataagccggcagacagtggctacgaaacagagaacttggagtctcccgagtggaccttgcatcccgctcccgagggcaccgcagactcagaaccagccaccacgggcgatggcggccacagcggtctgcctcccaacccggtcattgtcatctcagatgccggcgatggtcacagaggcacagaagtgacccctgagacgttcacagctggctcccagggttcataccgagactctgcgtacttctcagacaatgactctgagcccgagaaaaggtctgaggaggtcccgggaacctccccatccgccttggtgttggtacaggagcagcccctacccgagccagtcctccccgagcaaagtcctgctgcccaggatagctgcctggaagccagaaagagccagccagatgaaagttgtctgtctgctttgcacaactccagtgacctggaattaagagccacgccggagccagcacagactggtgttccccagcaggtgcatcccacggaagacgaggccagcagtccctggagtgtgctgaatgcagaacttagcagcggcgatgacttcgagacacaggacgatcgcccctgcaccctcgcttccacggggaccaacacgaacgaactccttgcctacaccaattctgcgctggacaagtccctgtccagccactccgagggcccgaagttgaaggagccggacatcgaagggaagtacctggggaaactcggggtgtcagggatgctcgacctctcagaggacgggatggatgcagacgaggaggacgaaaacagcgacgactcggacgaggacctgcgggccttcaacctgcatagcctcagctccgagtcggaggacgagaccgagcaccccgtgcccatcatcctcagcaacgaggacggaaggcacctgcggagtctgttgaagcccacagcggccaatgcccccgacccactgcccgaggactggaagaaggaaaagaaggcagtcacgtttttcgatgatgtcacagtctacctgtttgaccaggagaccccaaccaaagagctggggccctgtggaggagaggcgtgcggcccggacctgagcggcccagccccagcctcaggctctccctacctgagcaggtgcatcaactccgaaagctccaccgacgaagaaggtggtggctttgagtgggatgatgacttctccccagatccttttatgtcaaagacaacaagtaacctgctcagctccaagccttctctccaaacatccaagtacttttctccgccgccaccggcccggagcacggagcagagctggccgcactcggcgccttactcccggttctccatctctcccgccaacattgccagcttttccctcacacacctgaccgactcggacatcgagcagggcggaagcagcgaagacggagaaaaggactag

SEQ ID NO: 450 - DNA, 4512 bp, Homo sapiens
atgccggggccgccggcgttgcggcggaggctgctgctgctgctgctggtcctcctgatcgccggcagtgctggggccgcgccacttccgcaaacaggtgcaggggaggcgccacctgctgcagaagtttcctcatcttttgtgatcctgtgtgtgtgcagtttaataatattaatagtgttaattgcaaactgtgtatcctgctgtaaggacccagaaatagactttaaggaatttgaagataattttgatgatgagatagatttcacaccaccagcagaagacactccctctgttcagtccccagcagaggtcttcacactttcagtaccaaatatttcactcccagctccctcgcaattccagccttctgtagagggattgaagtctcaagttgcccgccacagtctaaactacatacaggaaattggaaatggctggtttggaaaggttctcttgggagagatttacacgggcactagcgtagcaagagtcatcgtgaaggagttaaaagcaagtgccaacccaaaggaacaagatacttttttgaaaaatggagaaccttactacattcttcagcatccaaatattcttcagtgtgttggacagtgcgtagaagcgattccctacctcctggtgtttgagttctgtgacttgggtgacctgaaggcgtatctgcgcagcgagcaggagcacatgcggggggactcacagaccatgctgctgcagaggatggcgtgcgaggtcgccgcggggctggccgccatgcacaagctgcacttcctgcacagtgatttagccctgcggaattgttttctcacctccgacttaaatgtgaaagtgggagattacggaataggattcagcaggtacaaggaggattatattgaaacagatgataaaaaagttttccctctgcgatggactgctccagaattagtaaccagctttcaagacagactgctaactgcagatcagactaagtatagtaatatctggtctctgggtgtgacactttgggagctttttgacaatgccgcacagccgtattcaaacctttccaacttagatgtcctcaaccaagtcattagagagagagacacaaaactcccgaagccccagctggagcagccctactctgatagatggtatgaagtcttacagttctgttggctgtcaccagaaaagagacccgcggctgaagatgtgcacaggctgctgacttacctgcggctgcagagccagcgggactcagaggtcgactttgaacagcagtggaacgctctgaagccgaacacaaacagcagagactcctccaacaatgctgcattcccaattctcgaccactttgccagggaccggctgggtcgtgaaatggaggaagtcctcaccgtgaccgaaaccagccagggcctgagcttcgagtatgtctgggaggccgctaagcacgaccactttgacgagcgcagccggggccacctggacgaaggcttgtcctacacgagcatcttctatccggttgaagtttttgagagttcgctttcagatcctgtgcccggaaagcaagatgacagcggccaggatgtccccctgagggtccctggagtggttcctgtttttgatgcccacaacctttctgttggaagcgactattatatccagttagaagaaaaaagtggtagtaacttggagcttgattacccaccagcgctgctcacaaccgacatggataatccagaaaggactggccctgaactgtcccagctcacggcgctcaggagcgttgaacttgaggagtccagtacagatgaggacttcttccaaagcagtacagaccccaaagactctagcttaccaggggacttacacgtgaccagtggccccgagagccctttcaacaatatatttaatgatgtggacaaatcggaagatttgcccagtcaccaaaaaatattcgacttaatggaattaaacggagttcaagccgactttaaacctgccactttaagttccagtttggataaccccaaagagtcagtcataacaggccactttgagaaagaaaagccccgtaagatttttgacagtgagcctctctgcctatcagataatcttatgcaccaagataattttgatccattgaatgttcaagaattgtcagaaaactttttatttcttcaagagaaaaacttactaaaaggctcattgtccagcaaagaacacataaatgatcttcagacagaacttaagaatgctggttttactgaagctatgttagaaacgtcatgtagaaactctttagatactgagcttcagtttgctgaaaataagccaggcttgtctttgttgcaggaaaacgtaagcacaaagggtgacgatacagatgtcatgctcacaggtgacactttgagcacctcattgcagtcttccccggaagtgcaggtacctcctacctccttcgaaacagaagaaacgccccgtcgggtacccccagactcactcccaacacagggagaaacccagcccacgtgtttagatgttattgtcccggaggactgtctccaccaggacatcagtccagacgctgtgactgtcccggttgaaattctctcaactgatgccagaacccacagcctggataacaggtcccaggactctcctggcgagagtgaggagaccctgcgactcaccgaaagtgactctgttcttgctgatgacatccttgccagcagggtgagtgtagggagtagtctcccggaactgggacaggaattgcacaataaaccattttcggaagaccatcacagtcatcgccggctagagaaaaacttagaggctgtggagactttaaatcagctcaattctaaagacgcagcaaaagaagcaggcttggtgtctgccctctcctcggactcaaccagtcaggacagcctcctggaggacagcttgtcagcacccttcccagcctctgagccgtccctggaaaccccggactctctggagtcagtggatgtccacgaagcgctactggactctttaggatctcacactccccagaaactagtgccccccgataagccggcagacagtggctacgaaacagagaacttggagtctcccgagtggaccttgcatcccgctcccgagggcaccgcagactcagaaccagccaccacgggcgatggcggccacagcggtctgcctcccaacccggtcattgtcatctcagatgccggcgatggtcacagaggcacagaagtgacccctgagacgttcacagctggctcccagggttcataccgagactctgcgtacttctcagacaatgactctgagcccgagaaaaggtctgaggaggtcccgggaacctccccatccgccttggtgttggtacaggagcagcccctacccgagccagtcctccccgagcaaagtcctgctgcccaggatagctgcctggaagccagaaagagccagccagatgaaagttgtctgtctgctttgcacaactccagtgacctggaattaagagccacgccggagccagcacagactggtgttccccagcaggtgcatcccacggaagacgaggccagcagtccctggagtgtgctgaatgcagaacttagcagcggcgatgacttcgagacacaggacgatcgcccctgcaccctcgcttccacggggaccaacacgaacgaactccttgcctacaccaattctgcgctggacaagtccctgtccagccactccgagggcccgaagttgaaggagccggacatcgaagggaagtacctggggaaactcggggtgtcagggatgctcgacctctcagaggacgggatggatgcagacgaggaggacgaaaacagcgacgactcggacgaggacctgcgggccttcaacctgcatagcctcagctccgagtcggaggacgagaccgagcaccccgtgcccatcatcctcagcaacgaggacggaaggcacctgcggagtctgttgaagcccacagcggccaatgcccccgacccactgcccgaggactggaagaaggaaaagaaggcagtcacgtttttcgatgatgtcacagtctacctgtttgaccaggagaccccaaccaaagagctggggccctgtggaggagaggcgtgcggcccggacctgagcggcccagccccagcctcaggctctccctacctgagcaggtgcatcaactccgaaagctccaccgacgaagaaggtggtggctttgagtgggatgatgacttctccccagatccttttatgtcaaagacaacaagtaacctgctcagctccaagccttctctccaaacatccaagtacttttctccgccgccaccggcccggagcacggagcagagctggccgcactcggcgccttactcccggttctccatctctcccgccaacattgccagcttttccctcacacacctgaccgactcggacatcgagcagggcggaagcagcgaagacggagaaaaggactag

SEQ ID NO: 451 - DNA, 4512 bp, Homo sapiens
atgccggggccgccggcgttgcggcggaggctgctgctgctgctgctggtcctcctgatcgccggcagtgctggggccgcgccacttccgcaaacaggtgcaggggaggcgccacctgctgcagaagtttcctcatcttttgtgatcctgtgtgtgtgcagtttaataatattaatagtgttaattgcaaactgtgtatcctgctgtaaggacccagaaatagactttaaggaatttgaagataattttgatgatgagatagatttcacaccaccagcagaagacactccctctgttcagtccccagcagaggtcttcacactttcagtaccaaatatttcactcccagctccctcgcaattccagccttctgtagagggattgaagtctcaagttgcccgccacagtctaaactacatacaggaaattggaaatggctggtttggaaaggttctcttgggagagatttacacgggcactagcgtagcaagagtcatcgtgaaggagttaaaagcaagtgccaacccaaaggaacaagatacttttttgaaaaatggagaaccttactacattcttcagcatccaaatattcttcagtgtgttggacagtgcgtagaagcgattccctacctcctggtgtttgagttctgtgacttgggtgacctgaaggcgtatctgcgcagcgagcaggagcacatgcggggggactcacagaccatgctgctgcagaggatggcgtgcgaggtcgccgcggggctggccgccatgcacaagctgcacttcctgcacagtgatttagccctgcggaattgttttctcacctccgacttaaatgtgaaagtgggagattacggaataggattcagcaggtacaaggaggattatattgaaacagatgataaaaaagttttccctctgcgatggactgctccagaattagtaaccagctttcaagacagactgctaactgcagatcagactaagtatagtaatatctggtctctgggtgtgacactttgggagctttttgacaatgccgcacagccgtattcaaacctttccaacttagatgtcctcaaccaagtcattagagagagagacacaaaactcccgaagccccagctggagcagccctactctgatagatggtatgaagtcttacagttctgttggctgtcaccagaaaagagacccgcggctgaagatgtgcacaggctgctgacttacctgcggctgcagagccagcgggactcagaggtcgactttgaacagcagtggaacgctctgaagccgaacacaaacagcagagactcctccaacaatgctgcattcccaattctcgaccactttgccagggaccggctgggtcgtgaaatggaggaagtcctcaccgtgaccgaaaccagccagggcctgagcttcgagtatgtctgggaggccgctaagcacgaccactttgacgagcgcagccggggccacctggacgaaggcttgtcctacacgagcatcttctatccggttgaagtttttgagagttcgctttcagatcctgggcccggaaagcaatatgacagcggccaggatgtccccctgagggtccctggagtggttcctgtttttgatgcccacaacctttctgttggaagcgactattatatccagttagaagaaaaaagtggtagtaacttggagcttgattacccaccagcgctgctcacaaccgacatggataatccagaaaggactggccctgaactgtcccagctcacggcgctcaggagcgttgaacttgaggagtccagtacagatgaggacttcttccaaagcagtacagaccccaaagactctagcttaccaggggacttacacgtgaccagtggccccgagagccctttcaacaatatatttaatgatgtggacaaatcggaagatttgcccagtcaccaaaaaatattcgacttaatggaattaaacggagttcaagccgactttaaacctgccactttaagttccagtttggataaccccaaagagtcagtcataacaggccactttgagaaagaaaagccccgtaagatttttgacagtgagcctctctgcctatcagataatcttatgcaccaagataattttgatccattgaatgttcaagaattgtcagaaaactttttatttcttcaagagaaaaacttactaaaaggctcattgtccagcaaagaacacataaatgatcttcagacagaacttaagaatgctggttttactgaagctatgttagaaacgtcatgtagaaactctttagatactgagcttcagtttgctgaaaataagccaggcttgtctttgttgcaggaaaacgtaagcacaaagggtgacgatacagatgtcatgctcacaggtgacactttgagcacctcattgcagtcttccccggaagtgcaggtacctcctacctccttcgaaacagaagaaacgccccgtcgggtacccccagactcactcccaacacagggagaaacccagcccacgtgtttagatgttattgtcccggaggactgtctccaccaggacatcagtccagacgctgtgactgtcccggttgaaattctctcaactgatgccagaacccacagcctggataacaggtcccaggactctcctggcgagagtgaggagaccctgcgactcaccgaaagtgactctgttcttgctgatgacatccttgccagcagggtgagtgtagggagtagtctcccggaactgggacaggaattgcacaataaaccattttcggaagaccatcacagtcatcgccggctagagaaaaacttagaggctgtggagactttaaatcagctcaattctaaagacgcagcaaaagaagcaggcttggtgtctgccctctcctcggactcaaccagtcaggacagcctcctggaggacagcttgtcagcacccttcccagcctctgagccgtccctggaaaccccggactctctggagtcagtggatgtccacgaagcgctactggactctttaggatctcacactccccagaaactagtgccccccgataagccggcagacagtggctacgaaacagagaacttggagtctcccgagtggaccttgcatcccgctcccgagggcaccgcagactcagaaccagccaccacgggcgatggcggccacagcggtctgcctcccaacccggtcattgtcatctcagatgccggcgatggtcacagaggcacagaagtgacccctgagacgttcacagctggctcccagggttcataccgagactctgcgtacttctcagacaatgactctgagcccgagaaaaggtctgaggaggtcccgggaacctccccatccgccttggtgttggtacaggagcagcccctacccgagccagtcctccccgagcaaagtcctgctgcccaggatagctgcctggaagccagaaagagccagccagatgaaagttgtctgtctgctttgcacaactccagtgacctggaattaagagccacgccggagccagcacagactggtgttccccagcaggtgcatcccacggaagacgaggccagcagtccctggagtgtgctgaatgcagaacttagcagcggcgatgacttcgagacacaggacgatcgcccctgcaccctcgcttccacggggaccaacacgaacgaactccttgcctacaccaattctgcgctggacaagtccctgtccagccactccgagggcccgaagttgaaggagccggacatcgaagggaagtacctggggaaactcggggtgtcagggatgctcgacctctcagaggacgggatggatgcagacgaggaggacgaaaacagcgacgactcggacgaggacctgcgggccttcaacctgcatagcctcagctccgagtcggaggacgagaccgagcaccccgtgcccatcatcctcagcaacgaggacggaaggcacctgcggagtctgttgaagcccacagcggccaatgcccccgacccactgcccgaggactggaagaaggaaaagaaggcagtcacgtttttcgatgatgtcacagtctacctgtttgaccaggagaccccaaccaaagagctggggccctgtggaggagaggcgtgcggcccggacctgagcggcccagccccagcctcaggctctccctacctgagcaggtgcatcaactccgaaagctccaccgacgaagaaggtggtggctttgagtgggatgatgacttctccccagatccttttatgtcaaagacaacaagtaacctgctcagctccaagccttctctccaaacatccaagtacttttctccgccgccaccggcccggagcacggagcagagctggccgcactcggcgccttactcccggttctccatctctcccgccaacattgccagcttttccctcacacacctgaccgactcggacatcgagcagggcggaagcagcgaagacggagaaaaggactag

SEQ ID NO: 452 - DNA, 4512 bp, Homo sapiens
atgccggggccgccggcgttgcggcggaggctgctgctgctgctgctggtcctcctgatcgccggcagtgctggggccgcgccacttccgcaaacaggtgcaggggaggcgccacctgctgcagaagtttcctcatcttttgtgatcctgtgtgtgtgcagtttaataatattaatagtgttaattgcaaactgtgtatcctgctgtaaggacccagaaatagactttaaggaatttgaagataattttgatgatgagatagatttcacaccaccagcagaagacactccctctgttcagtccccagcagaggtcttcacactttcagtaccaaatatttcactcccagctccctcgcaattccagccttctgtagagggattgaagtctcaagttgcccgccacagtctaaactacatacaggaaattggaaatggctggtttggaaaggttctcttgggagagatttacacgggcactagcgtagcaagagtcatcgtgaaggagttaaaagcaagtgccaacccaaaggaacaagatacttttttgaaaaatggagaaccttactacattcttcagcatccaaatattcttcagtgtgttggacagtgcgtagaagcgattccctacctcctggtgtttgagttctgtgacttgggtgacctgaaggcgtatctgcgcagcgagcaggagcacatgcggggggactcacagaccatgctgctgcagaggatggcgtgcgaggtcgccgcggggctggccgccatgcacaagctgcacttcctgcacagtgatttagccctgcggaattgttttctcacctccgacttaaatgtgaaagtgggagattacggaataggattcagcaggtacaaggaggattatattgaaacagatgataaaaaagttttccctctgcgatggactgctccagaattagtaaccagctttcaagacagactgctaactgcagatcagactaagtatagtaatatctggtctctgggtgtgacactttgggagctttttgacaatgccgcacagccgtattcaaacctttccaacttagatgtcctcaaccaagtcattagagagagagacacaaaactcccgaagccccagctggagcagccctactctgatagatggtatgaagtcttacagttctgttggctgtcaccagaaaagagacccgcggctgaagatgtgcacaggctgctgacttacctgcggctgcagagccagcgggactcagaggtcgactttgaacagcagtggaacgctctgaagccgaacacaaacagcagagactcctccaacaatgctgcattcccaattctcgaccactttgccagggaccggctgggtcgtgaaatggaggaagtcctcaccgtgaccgaaaccagccagggcctgagcttcgagtatgtctgggaggccgctaagcacgaccactttgacgagcgcagccggggccacctggacgaaggcttgtcctacacgagcatcttctatccggttgaagtttttgagagttcgctttcagatcctgggcccggaaagcaagatgacagcggccaggatgtccccctgagggtccctggagtggttcctgtttttgatgcccacaacctttctgttggaagcgactattatatccagttagaagaaaaaagtggtagtaacttggagcttgattacccaccagcgctgctcacaaccgacatggataatccagaaaggactggccctgaactgtcccagctcacggcgctcaggagcgttgaacttgaggagtccagtacagatgaggacttcttccaaagcagtacagaccccaaagactctagcttaccaggggacttacacgtgaccagtggccccgagagccctttcaacaatatatttaatgatgtggacaaatcggaagatttgcccagtcaccaaaaaatattcgacttaatggaattaaacggagttcaagccgactttaaacctgccactttaagttccagtttggataaccccaaagagtcagtcataacaggccactttgagaaagaaaagccccgtaagatttttgacagtgagcctctctgcctatcagataatcttatgcaccaagataattttgatccattgaatgttcaagaattgtcagaaaactttttatttcttcaagagaaaaacttactaaaaggctcattgtccagcaaagaacacataaatgatcttcagacagaacttaagaatgctggttttactgaagctgtgttagaaacgtcatgtagaaactctttagatactgagcttcagtttgctgaaaataagccaggcttgtctttgttgcaggaaaacgtaagcacaaagggtgacgatacagatgtcatgctcacaggtgacactttgagcacctcattgcagtcttccccggaagtgcaggtacctcctacctccttcgaaacagaagaaacgccccgtcgggtacccccagactcactcccaacacagggagaaacccagcccacgtgtttagatgttattgtcccggaggactgtctccaccaggacatcagtccagacgctgtgactgtcccggttgaaattctctcaactgatgccagaacccacagcctggataacaggtcccaggactctcctggcgagagtgaggagaccctgcgactcaccgaaagtgactctgttcttgctgatgacatccttgccagcagggtgagtgtagggagtagtctcccggaactgggacaggaattgcacaataaaccattttcggaagaccatcacagtcatcgccggctagagaaaaacttagaggctgtggagactttaaatcagctcaattctaaagacgcagcaaaagaagcaggcttggtgtctgccctctcctcggactcaaccagtcaggacagcctcctggaggacagcttgtcagcacccttcccagcctctgagccgtccctggaaaccccggactctctggagtcagtggatgtccacgaagcgctactggactctttaggatctcacactccccagaaactagtgccccccgataagccggcagacagtggctacgaaacagagaacttggagtctcccgagtggaccttgcatcccgctcccgagggcaccgcagactcagaaccagccaccacgggcgatggcggccacagcggtctgcctcccaacccggtcattgtcatctcagatgccggcgatggtcacagaggcacagaagtgacccctgagacgttcacagctggctcccagggttcataccgagactctgcgtacttctcagacaatgactctgagcccgagaaaaggtctgaggaggtcccgggaacctccccatccgccttggtgttggtacaggagcagcccctacccgagccagtcctccccgagcaaagtcctgctgcccaggatagctgcctggaagccagaaagagccagccagatgaaagttgtctgtctgctttgcacaactccagtgacctggaattaagagccacgccggagccagcacagactggtgttccccagcaggtgcatcccacggaagacgaggccagcagtccctggagtgtgctgaatgcagaacttagcagcggcgatgacttcgagacacaggacgatcgcccctgcaccctcgcttccacggggaccaacacgaacgaactccttgcctacaccaattctgcgctggacaagtccctgtccagccactccgagggcccgaagttgaaggagccggacatcgaagggaagtacctggggaaactcggggtgtcagggatgctcgacctctcagaggacgggatggatgcagacgaggaggacgaaaacagcgacgactcggacgaggacctgcgggccttcaacctgcatagcctcagctccgagtcggaggacgagaccgagcaccccgtgcccatcatcctcagcaacgaggacggaaggcacctgcggagtctgttgaagcccacagcggccaatgcccccgacccactgcccgaggactggaagaaggaaaagaaggcagtcacgtttttcgatgatgtcacagtctacctgtttgaccaggagaccccaaccaaagagctggggccctgtggaggagaggcgtgcggcccggacctgagcggcccagccccagcctcaggctctccctacctgagcaggtgcatcaactccgaaagctccaccgacgaagaaggtggtggctttgagtgggatgatgacttctccccagatccttttatgtcaaagacaacaagtaacctgctcagctccaagccttctctccaaacatccaagtacttttctccgccgccaccggcccggagcacggagcagagctggccgcactcggcgccttactcccggttctccatctctcccgccaacattgccagcttttccctcacacacctgaccgactcggacatcgagcagggcggaagcagcgaagacggagaaaaggactag

SEQ ID NO: 453 - DNA, 4512 bp, Homo sapiens
atgccggggccgccggcgttgcggcggaggctgctgctgctgctgctggtcctcctgatcgccggcagtgctggggccgcgccacttccgcaaacaggtgcaggggaggcgccacctgctgcagaagtttcctcatcttttgtgatcctgtgtgtgtgcagtttaataatattaatagtgttaattgcaaactgtgtatcctgctgtaaggacccagaaatagactttaaggaatttgaagataattttgatgatgagatagatttcacaccaccagcagaagacactccctctgttcagtccccagcagaggtcttcacactttcagtaccaaatatttcactcccagctccctcgcaattccagccttctgtagagggattgaagtctcaagttgcccgccacagtctaaactacatacaggaaattggaaatggctggtttggaaaggttctcttgggagagatttacacgggcactagcgtagcaagagtcatcgtgaaggagttaaaagcaagtgccaacccaaaggaacaagatacttttttgaaaaatggagaaccttactacattcttcagcatccaaatattcttcagtgtgttggacagtgcgtagaagcgattccctacctcctggtgtttgagttctgtgacttgggtgacctgaaggcgtatctgcgcagcgagcaggagcacatgcggggggactcacagaccatgctgctgcagaggatggcgtgcgaggtcgccgcggggctggccgccatgcacaagctgcacttcctgcacagtgatttagccctgcggaattgttttctcacctccgacttaaatgtgaaagtgggagattacggaataggattcagcaggtacaaggaggattatattgaaacagatgataaaaaagttttccctctgcgatggactgctccagaattagtaaccagctttcaagacagactgctaactgcagatcagactaagtatagtaatatctggtctctgggtgtgacactttgggagctttttgacaatgccgcacagccgtattcaaacctttccaacttagatgtcctcaaccaagtcattagagagagagacacaaaactcccgaagccccagctggagcagccctactctgatagatggtatgaagtcttacagttctgttggctgtcaccagaaaagagacccgcggctgaagatgtgcacaggctgctgacttacctgcggctgcagagccagcgggactcagaggtcgactttgaacagcagtggaacgctctgaagccgaacacaaacagcagagactcctccaacaatgctgcattcccaattctcgaccactttgccagggaccggctgggtcgtgaaatggaggaagtcctcaccgtgaccgaaaccagccagggcctgagcttcgagtatgtctgggaggccgctaagcacgaccactttgacgagcgcagccggggccacctggacgaaggcttgtcctacacgagcatcttctatccggttgaagtttttgagagttcgctttcagatcctgggcccggaaagcaagatgacagcggccaggatgtccccctgagggtccctggagtggttcctgtttttgatgcccacaacctttctgttggaagcgactattatatccagttagaagaaaaaagtggtagtaacttggagcttgattacccaccagcgctgctcacaaccgacatggataatccagaaaggactggccctgaactgtcccagctcacggcgctcaggagcgttgaacttgaggagtccagtacagatgaggacttcttccaaagcagtacagaccccaaagactctagcttaccaggggacttacacgtgaccagtggccccgagagccctttcaacaatatatttaatgatgtggacaaatcggaagatttgcccagtcaccaaaaaatattcgacttaatggaattaaacggagttcaagccgactttaaacctgccactttaagttccagtttggataaccccaaagagtcagtcataacaggccactttgagaaagaaaagccccgtaagatttttgacagtgagcctctctgcctatcagataatcttatgcaccaagataattttgatccattgaatgttcaagaattgtcagaaaactttttatttcttcaagagaaaaacttactaaaaggctcattgtccagcaaagaacacataaatgatcttcagacagaacttaagaatgctggttttactgaagctatgttagaaacgtcatgtagaaactctttagatactgagcttcagtttgctgaaaataagccaggcttgtctttgttgcaggaaaacgtaagcacaaagggtgacggtacagatgtcatgctcacaggtgacactttgagcacctcattgcagtcttccccggaagtgcaggtacctcctacctccttcgaaacagaagaaacgccccgtcgggtacccccagactcactcccaacacagggagaaacccagcccacgtgtttagatgttattgtcccggaggactgtctccaccaggacatcagtccagacgctgtgactgtcccggttgaaattctctcaactgatgccagaacccacagcctggataacaggtcccaggactctcctggcgagagtgaggagaccctgcgactcaccgaaagtgactctgttcttgctgatgacatccttgccagcagggtgagtgtagggagtagtctcccggaactgggacaggaattgcacaataaaccattttcggaagaccatcacagtcatcgccggctagagaaaaacttagaggctgtggagactttaaatcagctcaattctaaagacgcagcaaaagaagcaggcttggtgtctgccctctcctcggactcaaccagtcaggacagcctcctggaggacagcttgtcagcacccttcccagcctctgagccgtccctggaaaccccggactctctggagtcagtggatgtccacgaagcgctactggactctttaggatctcacactccccagaaactagtgccccccgataagccggcagacagtggctacgaaacagagaacttggagtctcccgagtggaccttgcatcccgctcccgagggcaccgcagactcagaaccagccaccacgggcgatggcggccacagcggtctgcctcccaacccggtcattgtcatctcagatgccggcgatggtcacagaggcacagaagtgacccctgagacgttcacagctggctcccagggttcataccgagactctgcgtacttctcagacaatgactctgagcccgagaaaaggtctgaggaggtcccgggaacctccccatccgccttggtgttggtacaggagcagcccctacccgagccagtcctccccgagcaaagtcctgctgcccaggatagctgcctggaagccagaaagagccagccagatgaaagttgtctgtctgctttgcacaactccagtgacctggaattaagagccacgccggagccagcacagactggtgttccccagcaggtgcatcccacggaagacgaggccagcagtccctggagtgtgctgaatgcagaacttagcagcggcgatgacttcgagacacaggacgatcgcccctgcaccctcgcttccacggggaccaacacgaacgaactccttgcctacaccaattctgcgctggacaagtccctgtccagccactccgagggcccgaagttgaaggagccggacatcgaagggaagtacctggggaaactcggggtgtcagggatgctcgacctctcagaggacgggatggatgcagacgaggaggacgaaaacagcgacgactcggacgaggacctgcgggccttcaacctgcatagcctcagctccgagtcggaggacgagaccgagcaccccgtgcccatcatcctcagcaacgaggacggaaggcacctgcggagtctgttgaagcccacagcggccaatgcccccgacccactgcccgaggactggaagaaggaaaagaaggcagtcacgtttttcgatgatgtcacagtctacctgtttgaccaggagaccccaaccaaagagctggggccctgtggaggagaggcgtgcggcccggacctgagcggcccagccccagcctcaggctctccctacctgagcaggtgcatcaactccgaaagctccaccgacgaagaaggtggtggctttgagtgggatgatgacttctccccagatccttttatgtcaaagacaacaagtaacctgctcagctccaagccttctctccaaacatccaagtacttttctccgccgccaccggcccggagcacggagcagagctggccgcactcggcgccttactcccggttctccatctctcccgccaacattgccagcttttccctcacacacctgaccgactcggacatcgagcagggcggaagcagcgaagacggagaaaaggactag

SEQ ID NO: 454 - DNA, 4512 bp, Homo sapiens
atgccggggccgccggcgttgcggcggaggctgctgctgctgctgctggtcctcctgatcgccggcagtgctggggccgcgccacttccgcaaacaggtgcaggggaggcgccacctgctgcagaagtttcctcatcttttgtgatcctgtgtgtgtgcagtttaataatattaatagtgttaattgcaaactgtgtatcctgctgtaaggacccagaaatagactttaaggaatttgaagataattttgatgatgagatagatttcacaccaccagcagaagacactccctctgttcagtccccagcagaggtcttcacactttcagtaccaaatatttcactcccagctccctcgcaattccagccttctgtagagggattgaagtctcaagttgcccgccacagtctaaactacatacaggaaattggaaatggctggtttggaaaggttctcttgggagagatttacacgggcactagcgtagcaagagtcatcgtgaaggagttaaaagcaagtgccaacccaaaggaacaagatacttttttgaaaaatggagaaccttactacattcttcagcatccaaatattcttcagtgtgttggacagtgcgtagaagcgattccctacctcctggtgtttgagttctgtgacttgggtgacctgaaggcgtatctgcgcagcgagcaggagcacatgcggggggactcacagaccatgctgctgcagaggatggcgtgcgaggtcgccgcggggctggccgccatgcacaagctgcacttcctgcacagtgatttagccctgcggaattgttttctcacctccgacttaaatgtgaaagtgggagattacggaataggattcagcaggtacaaggaggattatattgaaacagatgataaaaaagttttccctctgcgatggactgctccagaattagtaaccagctttcaagacagactgctaactgcagatcagactaagtatagtaatatctggtctctgggtgtgacactttgggagctttttgacaatgccgcacagccgtattcaaacctttccaacttagatgtcctcaaccaagtcattagagagagagacacaaaactcccgaagccccagctggagcagccctactctgatagatggtatgaagtcttacagttctgttggctgtcaccagaaaagagacccgcggctgaagatgtgcacaggctgctgacttacctgcggctgcagagccagcgggactcagaggtcgactttgaacagcagtggaacgctctgaagccgaacacaaacagcagagactcctccaacaatgctgcattcccaattctcgaccactttgccagggaccggctgggtcgtgaaatggaggaagtcctcaccgtgaccgaaaccagccagggcctgagcttcgagtatgtctgggaggccgctaagcacgaccactttgacgagcgcagccggggccacctggacgaaggcttgtcctacacgagcatcttctatccggttgaagtttttgagagttcgctttcagatcctgggcccggaaagcaagatgacagcggccaggatgtccccctgagggtccctggagtggttcctgtttttgatgcccacaacctttctgttggaagcgactattatatccagttagaagaaaaaagtggtagtaacttggagcttgattacccaccagcgctgctcacaaccgacatggataatccagaaaggactggccctgaactgtcccagctcacggcgctcaggagcgttgaacttgaggagtccagtacagatgaggacttcttccaaagcagtacagaccccaaagactctagcttaccaggggacttacacgtgaccagtggccccgagagccctttcaacaatatatttaatgatgtggacaaatcggaagatttgcccagtcaccaaaaaatattcgacttaatggaattaaacggagttcaagccgactttaaacctgccactttaagttccagtttggataaccccaaagagtcagtcataacaggccactttgagaaagaaaagccccgtaagatttttgacagtgagcctctctgcctatcagataatcttatgcaccaagataattttgatccattgaatgttcaagaattgtcagaaaactttttatttcttcaagagaaaaacttactaaaaggctcattgtccagcaaagaacacataaatgatcttcagacagaacttaagaatgctggttttactgaagctatgttagaaacgtcatgtagaaactctttagatactgagcttcagtttgctgaaaataagccaggcttgtctttgttgcaggaaaacgtaagcacaaagggtgacgatacagatgtcatgctcacaggtgacactttgagcacctcattgcagtcttccccggaagtgcaggtacctcctacctccttcgaaacagaagaaacgccccgtcaggtacccccagactcactcccaacacagggagaaacccagcccacgtgtttagatgttattgtcccggaggactgtctccaccaggacatcagtccagacgctgtgactgtcccggttgaaattctctcaactgatgccagaacccacagcctggataacaggtcccaggactctcctggcgagagtgaggagaccctgcgactcaccgaaagtgactctgttcttgctgatgacatccttgccagcagggtgagtgtagggagtagtctcccggaactgggacaggaattgcacaataaaccattttcggaagaccatcacagtcatcgccggctagagaaaaacttagaggctgtggagactttaaatcagctcaattctaaagacgcagcaaaagaagcaggcttggtgtctgccctctcctcggactcaaccagtcaggacagcctcctggaggacagcttgtcagcacccttcccagcctctgagccgtccctggaaaccccggactctctggagtcagtggatgtccacgaagcgctactggactctttaggatctcacactccccagaaactagtgccccccgataagccggcagacagtggctacgaaacagagaacttggagtctcccgagtggaccttgcatcccgctcccgagggcaccgcagactcagaaccagccaccacgggcgatggcggccacagcggtctgcctcccaacccggtcattgtcatctcagatgccggcgatggtcacagaggcacagaagtgacccctgagacgttcacagctggctcccagggttcataccgagactctgcgtacttctcagacaatgactctgagcccgagaaaaggtctgaggaggtcccgggaacctccccatccgccttggtgttggtacaggagcagcccctacccgagccagtcctccccgagcaaagtcctgctgcccaggatagctgcctggaagccagaaagagccagccagatgaaagttgtctgtctgctttgcacaactccagtgacctggaattaagagccacgccggagccagcacagactggtgttccccagcaggtgcatcccacggaagacgaggccagcagtccctggagtgtgctgaatgcagaacttagcagcggcgatgacttcgagacacaggacgatcgcccctgcaccctcgcttccacggggaccaacacgaacgaactccttgcctacaccaattctgcgctggacaagtccctgtccagccactccgagggcccgaagttgaaggagccggacatcgaagggaagtacctggggaaactcggggtgtcagggatgctcgacctctcagaggacgggatggatgcagacgaggaggacgaaaacagcgacgactcggacgaggacctgcgggccttcaacctgcatagcctcagctccgagtcggaggacgagaccgagcaccccgtgcccatcatcctcagcaacgaggacggaaggcacctgcggagtctgttgaagcccacagcggccaatgcccccgacccactgcccgaggactggaagaaggaaaagaaggcagtcacgtttttcgatgatgtcacagtctacctgtttgaccaggagaccccaaccaaagagctggggccctgtggaggagaggcgtgcggcccggacctgagcggcccagccccagcctcaggctctccctacctgagcaggtgcatcaactccgaaagctccaccgacgaagaaggtggtggctttgagtgggatgatgacttctccccagatccttttatgtcaaagacaacaagtaacctgctcagctccaagccttctctccaaacatccaagtacttttctccgccgccaccggcccggagcacggagcagagctggccgcactcggcgccttactcccggttctccatctctcccgccaacattgccagcttttccctcacacacctgaccgactcggacatcgagcagggcggaagcagcgaagacggagaaaaggactag

SEQ ID NO: 455 - DNA, 4512 bp, Homo sapiens
atgccggggccgccggcgttgcggcggaggctgctgctgctgctgctggtcctcctgatcgccggcagtgctggggccgcgccacttccgcaaacaggtgcaggggaggcgccacctgctgcagaagtttcctcatcttttgtgatcctgtgtgtgtgcagtttaataatattaatagtgttaattgcaaactgtgtatcctgctgtaaggacccagaaatagactttaaggaatttgaagataattttgatgatgagatagatttcacaccaccagcagaagacactccctctgttcagtccccagcagaggtcttcacactttcagtaccaaatatttcactcccagctccctcgcaattccagccttctgtagagggattgaagtctcaagttgcccgccacagtctaaactacatacaggaaattggaaatggctggtttggaaaggttctcttgggagagatttacacgggcactagcgtagcaagagtcatcgtgaaggagttaaaagcaagtgccaacccaaaggaacaagatacttttttgaaaaatggagaaccttactacattcttcagcatccaaatattcttcagtgtgttggacagtgcgtagaagcgattccctacctcctggtgtttgagttctgtgacttgggtgacctgaaggcgtatctgcgcagcgagcaggagcacatgcggggggactcacagaccatgctgctgcagaggatggcgtgcgaggtcgccgcggggctggccgccatgcacaagctgcacttcctgcacagtgatttagccctgcggaattgttttctcacctccgacttaaatgtgaaagtgggagattacggaataggattcagcaggtacaaggaggattatattgaaacagatgataaaaaagttttccctctgcgatggactgctccagaattagtaaccagctttcaagacagactgctaactgcagatcagactaagtatagtaatatctggtctctgggtgtgacactttgggagctttttgacaatgccgcacagccgtattcaaacctttccaacttagatgtcctcaaccaagtcattagagagagagacacaaaactcccgaagccccagctggagcagccctactctgatagatggtatgaagtcttacagttctgttggctgtcaccagaaaagagacccgcggctgaagatgtgcacaggctgctgacttacctgcggctgcagagccagcgggactcagaggtcgactttgaacagcagtggaacgctctgaagccgaacacaaacagcagagactcctccaacaatgctgcattcccaattctcgaccactttgccagggaccggctgggtcgtgaaatggaggaagtcctcaccgtgaccgaaaccagccagggcctgagcttcgagtatgtctgggaggccgctaagcacgaccactttgacgagcgcagccggggccacctggacgaaggcttgtcctacacgagcatcttctatccggttgaagtttttgagagttcgctttcagatcctgggcccggaaagcaagatgacagcggccaggatgtccccctgagggtccctggagtggttcctgtttttgatgcccacaacctttctgttggaagcgactattatatccagttagaagaaaaaagtggtagtaacttggagcttgattacccaccagcgctgctcacaaccgacatggataatccagaaaggactggccctgaactgtcccagctcacggcgctcaggagcgttgaacttgaggagtccagtacagatgaggacttcttccaaagcagtacagaccccaaagactctagcttaccaggggacttacacgtgaccagtggccccgagagccctttcaacaatatatttaatgatgtggacaaatcggaagatttgcccagtcaccaaaaaatattcgacttaatggaattaaacggagttcaagccgactttaaacctgccactttaagttccagtttggataaccccaaagagtcagtcataacaggccactttgagaaagaaaagccccgtaagatttttgacagtgagcctctctgcctatcagataatcttatgcaccaagataattttgatccattgaatgttcaagaattgtcagaaaactttttatttcttcaagagaaaaacttactaaaaggctcattgtccagcaaagaacacataaatgatcttcagacagaacttaagaatgctggttttactgaagctatgttagaaacgtcatgtagaaactctttagatactgagcttcagtttgctgaaaataagccaggcttgtctttgttgcaggaaaacgtaagcacaaagggtgacgatacagatgtcatgctcacaggtgacactttgagcacctcattgcagtcttccccggaagtgcaggtacctcctacctccttcgaaacagaagaaacgccccgtcgggtacccccagactcactcccaacacagggagaaacccagcccacgtgtttagatgttattgtcccggaggactgtctccaccaggacatcagtccagacgctgtgactgtcccggttgaaattctctcaactgatgccagaacccacagcatggataacaggtcccaggactctcctggcgagagtgaggagaccctgcgactcaccgaaagtgactctgttcttgctgatgacatccttgccagcagggtgagtgtagggagtagtctcccggaactgggacaggaattgcacaataaaccattttcggaagaccatcacagtcatcgccggctagagaaaaacttagaggctgtggagactttaaatcagctcaattctaaagacgcagcaaaagaagcaggcttggtgtctgccctctcctcggactcaaccagtcaggacagcctcctggaggacagcttgtcagcacccttcccagcctctgagccgtccctggaaaccccggactctctggagtcagtggatgtccacgaagcgctactggactctttaggatctcacactccccagaaactagtgccccccgataagccggcagacagtggctacgaaacagagaacttggagtctcccgagtggaccttgcatcccgctcccgagggcaccgcagactcagaaccagccaccacgggcgatggcggccacagcggtctgcctcccaacccggtcattgtcatctcagatgccggcgatggtcacagaggcacagaagtgacccctgagacgttcacagctggctcccagggttcataccgagactctgcgtacttctcagacaatgactctgagcccgagaaaaggtctgaggaggtcccgggaacctccccatccgccttggtgttggtacaggagcagcccctacccgagccagtcctccccgagcaaagtcctgctgcccaggatagctgcctggaagccagaaagagccagccagatgaaagttgtctgtctgctttgcacaactccagtgacctggaattaagagccacgccggagccagcacagactggtgttccccagcaggtgcatcccacggaagacgaggccagcagtccctggagtgtgctgaatgcagaacttagcagcggcgatgacttcgagacacaggacgatcgcccctgcaccctcgcttccacggggaccaacacgaacgaactccttgcctacaccaattctgcgctggacaagtccctgtccagccactccgagggcccgaagttgaaggagccggacatcgaagggaagtacctggggaaactcggggtgtcagggatgctcgacctctcagaggacgggatggatgcagacgaggaggacgaaaacagcgacgactcggacgaggacctgcgggccttcaacctgcatagcctcagctccgagtcggaggacgagaccgagcaccccgtgcccatcatcctcagcaacgaggacggaaggcacctgcggagtctgttgaagcccacagcggccaatgcccccgacccactgcccgaggactggaagaaggaaaagaaggcagtcacgtttttcgatgatgtcacagtctacctgtttgaccaggagaccccaaccaaagagctggggccctgtggaggagaggcgtgcggcccggacctgagcggcccagccccagcctcaggctctccctacctgagcaggtgcatcaactccgaaagctccaccgacgaagaaggtggtggctttgagtgggatgatgacttctccccagatccttttatgtcaaagacaacaagtaacctgctcagctccaagccttctctccaaacatccaagtacttttctccgccgccaccggcccggagcacggagcagagctggccgcactcggcgccttactcccggttctccatctctcccgccaacattgccagcttttccctcacacacctgaccgactcggacatcgagcagggcggaagcagcgaagacggagaaaaggactag

SEQ ID NO: 456 - DNA, 4512 bp, Homo sapiens
atgccggggccgccggcgttgcggcggaggctgctgctgctgctgctggtcctcctgatcgccggcagtgctggggccgcgccacttccgcaaacaggtgcaggggaggcgccacctgctgcagaagtttcctcatcttttgtgatcctgtgtgtgtgcagtttaataatattaatagtgttaattgcaaactgtgtatcctgctgtaaggacccagaaatagactttaaggaatttgaagataattttgatgatgagatagatttcacaccaccagcagaagacactccctctgttcagtccccagcagaggtcttcacactttcagtaccaaatatttcactcccagctccctcgcaattccagccttctgtagagggattgaagtctcaagttgcccgccacagtctaaactacatacaggaaattggaaatggctggtttggaaaggttctcttgggagagatttacacgggcactagcgtagcaagagtcatcgtgaaggagttaaaagcaagtgccaacccaaaggaacaagatacttttttgaaaaatggagaaccttactacattcttcagcatccaaatattcttcagtgtgttggacagtgcgtagaagcgattccctacctcctggtgtttgagttctgtgacttgggtgacctgaaggcgtatctgcgcagcgagcaggagcacatgcggggggactcacagaccatgctgctgcagaggatggcgtgcgaggtcgccgcggggctggccgccatgcacaagctgcacttcctgcacagtgatttagccctgcggaattgttttctcacctccgacttaaatgtgaaagtgggagattacggaataggattcagcaggtacaaggaggattatattgaaacagatgataaaaaagttttccctctgcgatggactgctccagaattagtaaccagctttcaagacagactgctaactgcagatcagactaagtatagtaatatctggtctctgggtgtgacactttgggagctttttgacaatgccgcacagccgtattcaaacctttccaacttagatgtcctcaaccaagtcattagagagagagacacaaaactcccgaagccccagctggagcagccctactctgatagatggtatgaagtcttacagttctgttggctgtcaccagaaaagagacccgcggctgaagatgtgcacaggctgctgacttacctgcggctgcagagccagcgggactcagaggtcgactttgaacagcagtggaacgctctgaagccgaacacaaacagcagagactcctccaacaatgctgcattcccaattctcgaccactttgccagggaccggctgggtcgtgaaatggaggaagtcctcaccgtgaccgaaaccagccagggcctgagcttcgagtatgtctgggaggccgctaagcacgaccactttgacgagcgcagccggggccacctggacgaaggcttgtcctacacgagcatcttctatccggttgaagtttttgagagttcgctttcagatcctgggcccggaaagcaagatgacagcggccaggatgtccccctgagggtccctggagtggttcctgtttttgatgcccacaacctttctgttggaagcgactattatatccagttagaagaaaaaagtggtagtaacttggagcttgattacccaccagcgctgctcacaaccgacatggataatccagaaaggactggccctgaactgtcccagctcacggcgctcaggagcgttgaacttgaggagtccagtacagatgaggacttcttccaaagcagtacagaccccaaagactctagcttaccaggggacttacacgtgaccagtggccccgagagccctttcaacaatatatttaatgatgtggacaaatcggaagatttgcccagtcaccaaaaaatattcgacttaatggaattaaacggagttcaagccgactttaaacctgccactttaagttccagtttggataaccccaaagagtcagtcataacaggccactttgagaaagaaaagccccgtaagatttttgacagtgagcctctctgcctatcagataatcttatgcaccaagataattttgatccattgaatgttcaagaattgtcagaaaactttttatttcttcaagagaaaaacttactaaaaggctcattgtccagcaaagaacacataaatgatcttcagacagaacttaagaatgctggttttactgaagctatgttagaaacgtcatgtagaaactctttagatactgagcttcagtttgctgaaaataagccaggcttgtctttgttgcaggaaaacgtaagcacaaagggtgacgatacagatgtcatgctcacaggtgacactttgagcacctcattgcagtcttccccggaagtgcaggtacctcctacctccttcgaaacagaagaaacgccccgtcgggtacccccagactcactcccaacacagggagaaacccagcccacgtgtttagatgttattgtcccggaggactgtctccaccaggacatcagtccagacgctgtgactgtcccggttgaaattctctcaactgatgccagaacccacagcctggataacaggtcccaggactctcctggcgagagtgaggagaccctgcgactcaccgaaagtgactctgttcttgctgatgacatccttgccagcagggtgagtgtagggagtagtctcccggaactgggacaggaattgcacaataaaccattttcggaagaccatcacagtcatcgccggctagagaaaaacttagaggctgtggagactttaaatcagctcaattctaaagacgcagcaaaagaagcaggcttggtgtctgccctctcctcggactcaaccagtcaggacagcctcctggaggacagcttgtcagcacccttcccagcctctgagccgtccctggaaaccccggactctctggagtcagtggatgtccacgaagtgctactggactctttaggatctcacactccccagaaactagtgccccccgataagccggcagacagtggctacgaaacagagaacttggagtctcccgagtggaccttgcatcccgctcccgagggcaccgcagactcagaaccagccaccacgggcgatggcggccacagcggtctgcctcccaacccggtcattgtcatctcagatgccggcgatggtcacagaggcacagaagtgacccctgagacgttcacagctggctcccagggttcataccgagactctgcgtacttctcagacaatgactctgagcccgagaaaaggtctgaggaggtcccgggaacctccccatccgccttggtgttggtacaggagcagcccctacccgagccagtcctccccgagcaaagtcctgctgcccaggatagctgcctggaagccagaaagagccagccagatgaaagttgtctgtctgctttgcacaactccagtgacctggaattaagagccacgccggagccagcacagactggtgttccccagcaggtgcatcccacggaagacgaggccagcagtccctggagtgtgctgaatgcagaacttagcagcggcgatgacttcgagacacaggacgatcgcccctgcaccctcgcttccacggggaccaacacgaacgaactccttgcctacaccaattctgcgctggacaagtccctgtccagccactccgagggcccgaagttgaaggagccggacatcgaagggaagtacctggggaaactcggggtgtcagggatgctcgacctctcagaggacgggatggatgcagacgaggaggacgaaaacagcgacgactcggacgaggacctgcgggccttcaacctgcatagcctcagctccgagtcggaggacgagaccgagcaccccgtgcccatcatcctcagcaacgaggacggaaggcacctgcggagtctgttgaagcccacagcggccaatgcccccgacccactgcccgaggactggaagaaggaaaagaaggcagtcacgtttttcgatgatgtcacagtctacctgtttgaccaggagaccccaaccaaagagctggggccctgtggaggagaggcgtgcggcccggacctgagcggcccagccccagcctcaggctctccctacctgagcaggtgcatcaactccgaaagctccaccgacgaagaaggtggtggctttgagtgggatgatgacttctccccagatccttttatgtcaaagacaacaagtaacctgctcagctccaagccttctctccaaacatccaagtacttttctccgccgccaccggcccggagcacggagcagagctggccgcactcggcgccttactcccggttctccatctctcccgccaacattgccagcttttccctcacacacctgaccgactcggacatcgagcagggcggaagcagcgaagacggagaaaaggactag

SEQ ID NO: 457 - DNA, 1539 bp, Homo sapiens
atgggatgtataaaatcaaaagggaaagacagcttgagtgacgatggagtagatttgaagactcaaccagtacgtaatactgaaagaactatttatgtgagagatccaacgtccaataaacagcaaaggccagttccagaatctcagcttttacctggacagaggtttcaaactaaagatccagaggaacaaggagacattgtggtagccttgtacccctatgatggcatccacccggacgacttgtctttcaagaaaggagagaagatgaaagtcctggaggagcatggagaatggtggaaagcaaagtcccttttaacaaaaaaagaaggcttcatccccagcaactatgtggccaaactcaacaccttagaaacagaagagtgggttttcaaggatataaccaggaaggacgcagaaaggcagcttttggcaccaggaaatagcgctggagctttccttattagagaaagtgaaacattaaaaggaagcttctctctgtctgtcagagactttgaccctgtgcatggtgatgttattaagcactacaaaattagaagtctggataatgggggctattacatctctccacgaatcacttttccctgtatcagcgacatgattaaacattaccaaaagcaggcagatggcttgtgcagaagattggagaaggcttgtattagtcccaagccacagaagccatgggataaagatgcctgggagatcccccgggagtccatcaagttggtgaaaaggcttggcgctgggcagtttggggaagtctggatgggttactataacaacagtaccaaggtggctgtgaaaaccctgaagccaggaactatgtctgtgcaagccttcctggaagaagccaacctcatgaagaccctgcagcatgacaagctcgtgaggctctacgctgtggtcaccagggaggagcccatttacatcatcaccgagtacatggccaagggcagtttgctggatttcctgaagagcgatgaaggtggcaaagtgctgcttccaaagctcattgacttttctgctcagattgcagagggaatggcatacatcgagcggaagaactacattcaccgggacctgcgagcagctaatgttctggtctccgagtcactaatgtgcaaaattgcagattttggccttgctagagtaattgaagataatgagtacacagcaagggaaggtgctaagttccctattaagtggacggctccagaagcaatcaactttggatgtttcactattaagtctgatgtgtggtcctttggaatcctcctatacgaaattgtcacctatgggaaaattccctacccagggagaactaatgccgacgtgatgaccgccctgtcccagggctacaggatgccccgtgtggagaactgcccagatgagctctatgacattatgaaaatgtgctggaaagaaaaggcagaagagagaccaacgtttgactacttacagagcgtcctggatgatttctacacagccacggaagggcaataccagcagcagccttag

SEQ ID NO: 458 - DNA, 3000 bp, Homo sapiens
atggggccggccccgctgccgctgctgctgggcctcttcctccccgcgctctggcgtagagctatcactgaggcaagggaagaagccaagccttacccgctattcccgggaccttttccagggagcctgcaaactgaccacacaccgctgttatcccttcctcacgccagtgggtaccagcctgccttgatgttttcaccaacccagcctggaagaccacatacaggaaacgtagccattccccaggtgacctctgtcgaatcaaagcccctaccgcctcttgccttcaaacacacagttggacacataatactttctgaacataaaggtgtcaaatttaattgctcaatcagtgtacctaatatataccaggacaccacaatttcttggtggaaagatgggaaggaattgcttggggcacatcatgcaattacacagttttatccagatgatgaagttacagcaataatcgcttccttcagcataaccagtgtgcagcgttcagacaatgggtcgtatatctgtaagatgaaaataaacaatgaagagatcgtgtctgatcccatctacatcgaagtacaaggacttcctcactttactaagcagcctgagagcatgaatgtcaccagaaacacagccttcaacctcacctgtcaggctgtgggcccgcctgagcccgtcaacattttctgggttcaaaacagtagccgtgttaacgaacagcctgaaaaatccccctccgtgctaactgttccaggcctgacggagatggcggtcttcagttgtgaggcccacaatgacaaagggctgaccgtgtccaagggagtgcagatcaacatcaaagcaattccctccccaccaactgaagtcagcatccgtaacagcactgcacacagcattctgatctcctgggttcctggttttgatggatactccccgttcaggaattgcagcattcaggtcaaggaagctgatccgctgagtaatggctcagtcatgatttttaacacctctgccttaccacatctgtaccaaatcaagcagctgcaagccctggctaattacagcattggtgtttcctgcatgaatgaaataggctggtctgcagtgagcccttggattctagccagcacgactgaaggagccccatcagtagcacctttaaatgtcactgtgtttctgaatgaatctagtgataatgtggacatcagatggatgaagcctccgactaagcagcaggatggagaactggtgggctaccggatatcccacgtgtggcagagtgcagggatttccaaagagctcttggaggaagttggccagaatggcagccgagctcggatctctgttcaagtccacaatgctacgtgcacagtgaggattgcagccgtcaccagagggggagttgggcccttcagtgatccagtgaaaatatttatccctgcacacggttgggtagattatgccccctcttcaactccggcgcctggcaacgcagatcctgtgctcatcatctttggctgcttttgtggatttattttgattgggttgattttatacatctccttggccatcagaaaaagagtccaggagacaaagtttgggaatgcattcacagaggaggattctgaattagtggtgaattatatagcaaagaaatccttctgtcggcgagccattgaacttaccttacatagcttgggagtcagtgaggaactacaaaataaactagaagatgttgtgattgacaggaatcttctaattcttggaaaaattctgggtgaaggagagtttgggtctgtaatggaaggaaatcttaagcaggaagatgggacctctctgaaagtggcagtgaagaccatgaagttggacaactcttcacagcgggagatcgaggagtttctcagtgaggcagcgtgcatgaaagacttcagccacccaaatgtcattcgacttctaggtgtgtgtatagaaatgagctctcaaggcatcccaaagcccatggtaattttacccttcatgaaatacggggacctgcatacttacttactttattcccgattggagacaggaccaaagcatattcctctgcagacactattgaagttcatggtggatattgccctgggaatggagtatctgagcaacaggaattttcttcatcgagatttagctgctcgaaactgcatgttgcgagatgacatgactgtctgtgttgcggacttcggcctctctaagaagatttacagtggcgattattaccgccaaggccgcattgctaagatgcctgttaaatggatcgccatagaaagtcttgcagaccgagtctacacaagtaaaagtgatgtgtgggcatttggcgtgaccatgtgggaaatagctacgcggggaatgactccctatcctggggtccagaaccatgagatgtatgactatcttctccatggccacaggttgaagcagcccgaagactgcctggatgaactgtatcaaataatgtactcttgctggagaaccgatcccttagaccgccccaccttttcagtattgaggctgcagctagaaaaactcttagaaagtttgcctgacgttcggaaccaagcagacgttatttacgtcaatacacagttgctggagagctctgagggcctggcccagggctccacccttgctccactggacttgaacatcgaccctgactctataattgcctcctgcactccccgcgctgccatcagtgtggtcacagcagaagttcatgacagcaaacctcatgaaggacggtacatcctgaatgggggcagtgaggaatgggaagatctgacttctgccccctctgctgcagtcacagctgaaaagaacagtgttttaccgggggagagacttgttaggaatggggtctcctggtcccattcgagcatgctgcccttgggaagctcattgcccgatgaacttttgtttgctgacgactcctcagaaggctcagaagtcctgatgtga

SEQ ID NO: 459 - DNA, 4227 bp, Homo sapiens
atgaaggcccccgctgtgcttgcacctggcatcctcgtgctcctgtttatcttggtgcagaggagcaatggggagtgtaaagaggcactagcaaagtccgagatgaatgtgaatatgaagtatcagcttcccaacttcaccgcggaaacacccatccagaatgtcattctacatgagcatcacattttccttggtgccactaactacatttatgttttaaatgaggaagaccttcagaaggttgctgagtacaagactgggcctgtgctggaacacccagattgtttcccatgtcaggactgcagcagcaaagccaatttatcaggaggtgtttggaaagataacatcaacatggctctagttgtcgacacctactatgatgatcaactcattagctgtggcagcgtcaacagagggacctgccagcgacatgtctttccccacaatcatactgctgacatacagtcggaggttcactgcatattctccccacagatagaagagcccagccagtgtcctgactgtgtggtgagcgccctgggagccaaagtcctttcatctgtaaaggaccggttcatcaacttctttgtaggcaataccataaattcttcttatttcccagatcatccattgcattcgatatcagtgagaaggctaaaggaaacgaaagatggttttatgtttttgacggaccagtcctacattgatgttttacctgagttcagagattcttaccccattaagtatgtccatgcctttgaaagcaacaattttatttacttcttgacggtccaaagggaaactctagatgctcagacttttcacacaagaataatcaggttctgttccataaactctggattgcattcctacatggaaatgcctctggagtgtattctcacagaaaagagaaaaaagagatccacaaagaaggaagtgtttaatatacttcaggctgcgtatgtcagcaagcctggggcccagcttgctagacaaataggagccagcctgaatgatgacattcttttcggggtgttcgcacaaagcaagccagattctgccgaaccaatggatcgatctgccatgtgtgcattccctatcaaatatgtcaacgacttcttcaacaagatcgtcaacaaaaacaatgtgagatgtctccagcatttttacggacccaatcatgagcactgctttaataggacacttctgagaaattcatcaggctgtgaagcgcgccgtgatgaatatcgaacagagtttaccacagctttgcagcgcgttgacttattcatgggtcaattcagcgaagtcctcttaacatctatatccaccttcattaaaggagacctcaccatagctaatcttgggacatcagagggtcgcttcatgcaggttgtggtttctcgatcaggaccatcaacccctcatgtgaattttctcctggactcccatccagtgtctccagaagtgattgtggagcatacattaaaccaaaatggctacacactggttatcactgggaagaagatcacgaagatcccattgaatggcttgggctgcagacatttccagtcctgcagtcaatgcctctctgccccaccctttgttcagtgtggctggtgccacgacaaatgtgtgcgatcggaggaatgcctgagcgggacatggactcaacagatctgtctgcctgcaatctacaaggttttcccaaatagtgcaccccttgaaggagggacaaggctgaccatatgtggctgggactttggatttcggaggaataataaatttgatttaaagaaaactagagttctccttggaaatgagagctgcaccttgactttaagtgagagcacgatgaatacattgaaatgcacagttggtcctgccatgaataagcatttcaatatgtccataattatttcaaatggccacgggacaacacaatacagtacattctcctatgtggatcctgtaataacaagtatttcgccgaaatacggtcctatggctggtggcactttacttactttaactggaaattacctaaacagtgggaattctagacacatttcaattggtggaaaaacatgtactttaaaaagtgtgtcaaacagtattcttgaatgttataccccagcccaaaccatttcaactgagtttgctgttaaattgaaaattgacttagccaaccgagagacaagcatcttcagttaccgtgaagatcccattgtctatgaaattcatccaaccaaatcttttattagtacttggtggaaagaacctctcaacattgtcagttttctattttgctttgccagtggtgggagcacaataacaggtgttgggaaaaacctgaattcagttagtgtcccgagaatggtcataaatgtgcatgaagcaggaaggaactttacagtggcatgtcaacatcgctctaattcagagataatctgttgtaccactccttccctgcaacagctgaatctgcaactccccctgaaaaccaaagcctttttcatgttagatgggatcctttccaaatactttgatctcatttatgtacataatcctgtgtttaagccttttgaaaagccagtgatgatctcaatgggcaatgaaaatgtactggaaattaagggaaatgatattgaccctgaagcagttaaaggtgaagtgttaaaagttggaaataagagctgtgagaatatacacttacattctgaagccgttttatgcacggtccccaatgacctgctgaaattgaacagcgagctaaatatagagtggaagcaagcaatttcttcaaccgtccttggaaaagtaatagttcaaccagatcagaatttcacaggattgattgctggtgttgtctcaatatcaacagcactgttattactacttgggtttttcctgtggctgaaaaagagaaagcaaattaaagatctgggcagtgaattagttcgctacgatgcaagagtacacactcctcatttggataggcttgtaagtgcccgaagtgtaagcccaactacagaaatggtttcaaatgaatctgtagactaccgagctacttttccagaagatcagtttcctaattcatctcagaacggttcatgccgacaagtgcagtatcctctgacagacatgtcccccatcctaactagtggggactctgatatatccagtccattactgcaaaatactgtccacattgacctcagtgctctaaatccagagctggtccaggcagtgcagcatgtagtgattgggcccagtagcctgattgtgcatttcaatgaagtcataggaagagggcattttggttgtgtatatcatgggactttgttggacaatgatggcaagaaaattcactgtgctgtgaaatccttgaacagaatcactgacataggagaagtttcccaatttctgaccgagggaatcatcatgaaagattttagtcatcccaatgtcctctcgctcctgggaatctgcctgcgaagtgaagggtctccgctggtggtcctaccatacatgaaacatggagatcttcgaaatttcattcgaaatgagactcataatccaactgtaaaagatcttattggctttggtcttcaagtagccaaagcgatgaaatatcttgcaagcaaaaagtttgtccacagagacttggctgcaagaaactgtatgctggatgaaaaattcacagtcaaggttgctgattttggtcttgccagagacatgtatgataaagaatactatagtgtacacaacaaaacaggtgcaaagctgccagtgaagtggatggctttggaaagtctgcaaactcaaaagtttaccaccaagtcagatgtgtggtcctttggcgtcgtcctctgggagctgatgacaagaggagccccaccttatcctgacgtaaacacctttgatataactgtttacttgttgcaagggagaagactcctacaacccgaatactgcccagaccccttatatgaagtaatgctaaaatgctggcaccctaaagccgaaatgcgcccatccttttctgaactggtgtcccggatatcagcgatcttctctactttcattggggagcactatgtccatgtgaacgctacttatgtgaacgtaaaatgtgtcgctccgtatccttctctgttgtcatcagaagataacgctgatgatgaggtggacacacgaccagcctccttctgggagacatcatag

SEQ ID NO: 460 - DNA, 4227 bp, Homo sapiens
atgaaggcccccgctgtgcttgcacctggcatcctcgtgctcctgtttaccttggtgcagaggagcaatggggagtgtaaagaggcactagcaaagtccgagatgaatgtgaatatgaagtatcagcttcccaacttcaccgcggaaacacccatccagaatgtcattctacatgagcatcacattttccttggtgccactaactacatttatgttttaaatgaggaagaccttcagaaggttgctgagtacaagactgggcctgtgctggaacacccagattgtttcccatgtcaggactgcagcagcaaagccaatttatcaggaggtgtttggaaagataacatcaacatggctctagttgtcgacacctactatgatgatcaactcattagctgtggcagcgtcaacagagggacctgccagcgacatgtctttccccacaatcatactgctgacatacagtcggaggttcactgcatattctccccacagatagaagagcccagccagtgtcctgactgtgtggtgagcgccctgggagccaaagtcctttcatctgtaaaggaccggttcatcaacttctttgtaggcaataccataaattcttcttatttcccagatcatccattgcattcgatatcagtgagaaggctaaaggaaacgaaagatggttttatgtttttgacggaccagtcctacattgatgttttacctgagttcagagattcttaccccattaagtatgtccatgcctttgaaagcaacaattttatttacttcttgacggtccaaagggaaactctagatgctcagacttttcacacaagaataatcaggttctgttccataaactctggattgcattcctacatggaaatgcctctggagtgtattctcacagaaaagagaaaaaagagatccacaaagaaggaagtgtttaatatacttcaggctgcgtatgtcagcaagcctggggcccagcttgctagacaaataggagccagcctgaatgatgacattcttttcggggtgttcgcacaaagcaagccagattctgccgaaccaatggatcgatctgccatgtgtgcattctctatcaaatatgtcaacgacttcttcaacaagatcgtcaacaaaaacaatgtgagatgtctccagcatttttacggacccaatcatgagcactgctttaataggacacttctgagaaattcatcaggctgtgaagcgcgccgtgatgaatatcgaacagagtttaccacagctttgcagcgcgttgacttattcatgggtcaattcagcgaagtcctcttaacatctatatccaccttcattaaaggagacctcaccatagctaatcttgggacatcagagggtcgcttcatgcaggttgtggtttctcgatcaggaccatcaacccctcatgtgaattttctcctggactcccatccagtgtctccagaagtgattgtggagcatacattaaaccaaaatggctacacactggttatcactgggaagaagatcacgaagatcccattgaatggcttgggctgcagacatttccagtcctgcagtcaatgcctctctgccccaccctttgttcagtgtggctggtgccacgacaaatgtgtgcgatcggaggaatgcctgagcgggacatggactcaacagatctgtctgcctgcaatctacaaggttttcccaaatagtgcaccccttgaaggagggacaaggctgaccatatgtggctgggactttggatttcggaggaataataaatttgatttaaagaaaactagagttctccttggaaatgagagctgcaccttgactttaagtgagagcacgatgaatacattgaaatgcacagttggtcctgccatgaataagcatttcaatatgtccataattatttcaaatggccacgggacaacacaatacagtacattctcctatgtggatcctgtaataacaagtatttcgccgaaatacggtcctatggctggtggcactttacttactttaactggaaattacctaaacagtgggaattctagacacatttcaattggtggaaaaacatgtactttaaaaagtgtgtcaaacagtattcttgaatgttataccccagcccaaaccatttcaactgagtttgctgttaaattgaaaattgacttagccaaccgagagacaagcatcttcagttaccgtgaagatcccattgtctatgaaattcatccaaccaaatcttttattagtacttggtggaaagaacctctcaacattgtcagttttctattttgctttgccagtggtgggagcacaataacaggtgttgggaaaaacctgaattcagttagtgtcccgagaatggtcataaatgtgcatgaagcaggaaggaactttacagtggcatgtcaacatcgctctaattcagagataatctgttgtaccactccttccctgcaacagctgaatctgcaactccccctgaaaaccaaagcctttttcatgttagatgggatcctttccaaatactttgatctcatttatgtacataatcctgtgtttaagccttttgaaaagccagtgatgatctcaatgggcaatgaaaatgtactggaaattaagggaaatgatattgaccctgaagcagttaaaggtgaagtgttaaaagttggaaataagagctgtgagaatatacacttacattctgaagccgttttatgcacggtccccaatgacctgctgaaattgaacagcgagctaaatatagagtggaagcaagcaatttcttcaaccgtccttggaaaagtaatagttcaaccagatcagaatttcacaggattgattgctggtgttgtctcaatatcaacagcactgttattactacttgggtttttcctgtggctgaaaaagagaaagcaaattaaagatctgggcagtgaattagttcgctacgatgcaagagtacacactcctcatttggataggcttgtaagtgcccgaagtgtaagcccaactacagaaatggtttcaaatgaatctgtagactaccgagctacttttccagaagatcagtttcctaattcatctcagaacggttcatgccgacaagtgcagtatcctctgacagacatgtcccccatcctaactagtggggactctgatatatccagtccattactgcaaaatactgtccacattgacctcagtgctctaaatccagagctggtccaggcagtgcagcatgtagtgattgggcccagtagcctgattgtgcatttcaatgaagtcataggaagagggcattttggttgtgtatatcatgggactttgttggacaatgatggcaagaaaattcactgtgctgtgaaatccttgaacagaatcactgacataggagaagtttcccaatttctgaccgagggaatcatcatgaaagattttagtcatcccaatgtcctctcgctcctgggaatctgcctgcgaagtgaagggtctccgctggtggtcctaccatacatgaaacatggagatcttcgaaatttcattcgaaatgagactcataatccaactgtaaaagatcttattggctttggtcttcaagtagccaaagcgatgaaatatcttgcaagcaaaaagtttgtccacagagacttggctgcaagaaactgtatgctggatgaaaaattcacagtcaaggttgctgattttggtcttgccagagacatgtatgataaagaatactatagtgtacacaacaaaacaggtgcaaagctgccagtgaagtggatggctttggaaagtctgcaaactcaaaagtttaccaccaagtcagatgtgtggtcctttggcgtcgtcctctgggagctgatgacaagaggagccccaccttatcctgacgtaaacacctttgatataactgtttacttgttgcaagggagaagactcctacaacccgaatactgcccagaccccttatatgaagtaatgctaaaatgctggcaccctaaagccgaaatgcgcccatccttttctgaactggtgtcccggatatcagcgatcttctctactttcattggggagcactatgtccatgtgaacgctacttatgtgaacgtaaaatgtgtcgctccgtatccttctctgttgtcatcagaagataacgctgatgatgaggtggacacacgaccagcctccttctgggagacatcatag

SEQ ID NO: 461 - DNA, 4227 bp, Homo sapiens
atgaaggcccccgctgtgcttgcacctggcatcctcgtgctcctgtttaccttggtgcagaggagcaatggggagtgtaaagaggcactagcaaagtccgagatgaatgtgaatatgaagtatcagcttcccaacttcaccgcggaaacacccatccagaatgtcattctacatgagcatcacattttccttggtgccactaactacatttatgttttaaatgaggaagaccttcagaaggttgctgagtacaagactgggcctgtgctggaacacccagattgtttcccatgtcaggactgcagcagcaaagccaatttatcaggaggtgtttggaaagataacatcaacatggctctagttgtcgacacctactatgatgatcaactcattagctgtggcagcgtcaacagagggacctgccagcgacatgtctttccccacaatcatactgctgacatacagtcggaggttcactgcatattctccccacagatagaagagcccagccagtgtcctgactgtgtggtgagcgccctgggagccaaagtcctttcatctgtaaaggaccggttcatcaacttctttgtaggcaataccataaattcttcttatttcccagatcatccattgcattcgatatcagtgagaaggctaaaggaaacgaaagatggttttatgtttttgacggaccagtcctacattgatgttttacctgagttcagagattcttaccccattaagtatgtccatgcctttgaaagcaacaattttatttacttcttgacggtccaaagggaaactctagatgctcagacttttcacacaagaataatcaggttctgttccataaactctggattgcattcctacatggaaatgcctctggagtgtattctcacagaaaagagaaaaaagagatccacaaagaaggaagtgtttaatatacttcaggctgcgtatgtcagcaagcctggggcccagcttgctagacaaataggagccagcctgaatgatgacattcttttcggggtgttcgcacaaagcaagccagattctgccgaaccaatggatcgatctgccatgtgtgcattccctatcaaatatgtcaacgacttcttcaacaagatcgtcaacaaaaacaatgtgagatgtctccagcatttttacggacccaatcatgagcactgctttaataggacacttctgagaaattcatcaggctgtgaagcgcgccgtgatgaatatcgaacagagtttaccacagctttgcagcgcgttgacttattcatgggtcaattcagcgaagtcctcttaacatctatatccaccttcattaaaggagacctcaccatagctaatcttgggacatcagagggtcgcttcatgcaggttgtggtttctcgatcaggaccatcaacccctcatgtgaattttctcctggactcccatccagtgtctccagaagtgattgtggagcatacattaaaccaaaatggctacacactggttatcactgggaagaagatcacgaagatcccattgaatggcttgggctgcagacatttccagtcctgcagtcaatgcctctctgccccaccctttgttcagtgtggctggtgccacgacaaatgtgtgcgatcggaggaatgcctgagcgggacatggactcaacagatctgtctgcctgcaatctacaaggttttcccaaatagtgcaccccttgaaggagggacaaggctgaccatatgtggctgggactttggatttcggaggaataataaatttgatttaaagaaaactagagttctccttggaaatgagagctgcaccttgactttaagtgagagcacgatgaatacattgaaatgcacagttggtcctgccatgaataagcatttcaatatgtccataattatttcaaatggccacgggacaacacaatacagtacattctcctatgtggatcctgtaataacaagtatttcgccgaaatacggtcctatggctggtggcactttacttactttaactggaaattacctaaacagtgggaattctagacacattttaattggtggaaaaacatgtactttaaaaagtgtgtcaaacagtattcttgaatgttataccccagcccaaaccatttcaactgagtttgctgttaaattgaaaattgacttagccaaccgagagacaagcatcttcagttaccgtgaagatcccattgtctatgaaattcatccaaccaaatcttttattagtacttggtggaaagaacctctcaacattgtcagttttctattttgctttgccagtggtgggagcacaataacaggtgttgggaaaaacctgaattcagttagtgtcccgagaatggtcataaatgtgcatgaagcaggaaggaactttacagtggcatgtcaacatcgctctaattcagagataatctgttgtaccactccttccctgcaacagctgaatctgcaactccccctgaaaaccaaagcctttttcatgttagatgggatcctttccaaatactttgatctcatttatgtacataatcctgtgtttaagccttttgaaaagccagtgatgatctcaatgggcaatgaaaatgtactggaaattaagggaaatgatattgaccctgaagcagttaaaggtgaagtgttaaaagttggaaataagagctgtgagaatatacacttacattctgaagccgttttatgcacggtccccaatgacctgctgaaattgaacagcgagctaaatatagagtggaagcaagcaatttcttcaaccgtccttggaaaagtaatagttcaaccagatcagaatttcacaggattgattgctggtgttgtctcaatatcaacagcactgttattactacttgggtttttcctgtggctgaaaaagagaaagcaaattaaagatctgggcagtgaattagttcgctacgatgcaagagtacacactcctcatttggataggcttgtaagtgcccgaagtgtaagcccaactacagaaatggtttcaaatgaatctgtagactaccgagctacttttccagaagatcagtttcctaattcatctcagaacggttcatgccgacaagtgcagtatcctctgacagacatgtcccccatcctaactagtggggactctgatatatccagtccattactgcaaaatactgtccacattgacctcagtgctctaaatccagagctggtccaggcagtgcagcatgtagtgattgggcccagtagcctgattgtgcatttcaatgaagtcataggaagagggcattttggttgtgtatatcatgggactttgttggacaatgatggcaagaaaattcactgtgctgtgaaatccttgaacagaatcactgacataggagaagtttcccaatttctgaccgagggaatcatcatgaaagattttagtcatcccaatgtcctctcgctcctgggaatctgcctgcgaagtgaagggtctccgctggtggtcctaccatacatgaaacatggagatcttcgaaatttcattcgaaatgagactcataatccaactgtaaaagatcttattggctttggtcttcaagtagccaaagcgatgaaatatcttgcaagcaaaaagtttgtccacagagacttggctgcaagaaactgtatgctggatgaaaaattcacagtcaaggttgctgattttggtcttgccagagacatgtatgataaagaatactatagtgtacacaacaaaacaggtgcaaagctgccagtgaagtggatggctttggaaagtctgcaaactcaaaagtttaccaccaagtcagatgtgtggtcctttggcgtcgtcctctgggagctgatgacaagaggagccccaccttatcctgacgtaaacacctttgatataactgtttacttgttgcaagggagaagactcctacaacccgaatactgcccagaccccttatatgaagtaatgctaaaatgctggcaccctaaagccgaaatgcgcccatccttttctgaactggtgtcccggatatcagcgatcttctctactttcattggggagcactatgtccatgtgaacgctacttatgtgaacgtaaaatgtgtcgctccgtatccttctctgttgtcatcagaagataacgctgatgatgaggtggacacacgaccagcctccttctgggagacatcatag

SEQ ID NO: 462 - DNA, 2113 bp, Homo sapiens
atgctgcgaggcggacggcgcgggcagcttggctggcacagctgggctgcggggccgggcagcctgctggcttggctgatactggcatctgcgggcgccgcaccctgccccgatgcctgctgcccccacggctcctcgggactgcgatgcacccgggatggggccctggatagcctccaccacctgcccggcgcagagaacctgactgagctctacatcgagaaccagcagcatctgcagcatctggagctccgtgatctgaggggcctgggggagctgagaaacctcaccatcgtgaagagtggtctccgtttcgtggcgccagatgccttccatttcactcctcggctcagtcgcctgaatctctccttcaacgctctggagtctctctcctggaaaactgtgcagggcctctccttacaggaactggtcctgtcggggaaccctctgcactgttcttgtgccctgcgctggctacagcgctgggaggaggagggactgggcggagtgcctgaacagaagctgcagtgtcatgggcaagggcccctggcccacatgcccaatgccagctgtggtgtgcccacgctgaaggtccaggtgcccaatgcctcggtggatgtgggggacgacgtgctgctgcggtgccaggtggaggggcggggcctggagcaggccggctggatcctcacagagctggagcagtcagccacggtgatgaaatctgggggtctgccatccctggggctgaccctggccaatgtcaccagtgacctcaacaggaagaacgtgacgtgctgggcagagaacgatgtgggccgggcagaggtctctgttcaggtcaacgtctccttcccggccagtgtgcagctgcacacggcggtggagatgcaccactggtgcatccccttctctgtggatgggcagccggcaccgtctctgcgctggctcttcaatggctccgtgctcaatgagaccagcttcatcttcactgagttcctggagccggcagccaatgagaccgtgcggcacgggtgtctgcgcctcaaccagcccacccacgtcaacaacggcaactacacgctgctggctgccaaccccttcggccaggcctccgcctccatcatggctgccttcatggacaaccctttcgagttcaaccccgaggaccccatccctgtctccttctcgccggtggacactaacagcacatctggagacccggtggagaagaaggacgaaacaccttttggggtctcggtggctgtgggcctggccgtctttgcctgcctcttcctttctacgctgctccttgtgctcaacaaatgtggacggagaaacaagtttgggatcaaccgcactgaaggaggcgtccgagagtgctcggcaggacttccaacgtgaggctgagctgctcaccatgctgcagcaccagcacatcgtgcgcttcttcggcgtctgcaccgagggccgccccctgctcatggtcttcgagtatatgcggcacggggacctcaaccgcttcctccgatcccatggacccgatgccaagctgctggctggtggggaggatgtggctccaggccccctgggtctggggcagctgctggccgtggctagccaggtcgctgcggggatggtgtacctggcgggtctgcattttgtgcaccgggacctggccacacgcaactgtctagtgggccagggactggtggtcaagattggtgattttggcatgagcagggatatctacagcaccgactattaccgtgtgggaggccgcaccatgctgcccattcgctggatgccgcccgagagcatcctgtaccgtaagttcaccaccgagagcgacgtgtggagcttcggcgtggtgctctgggagatcttcacctacggcaagcagccctggtaccagctctccaacacggaggcaatcgactgcatcacgcagggacgtgagttggagcggccacgtgcctgcccaccagaggtctacgccatcatgcggggctgctggcagcgggagccccagcaacgccacagcatcaaggatgtgcacgcccggctgcaagccctggcccaggcacctcctgtctacctggatgtcctgggctag

SEQ ID NO: 463 - DNA, 2390 bp, Homo sapiens
atgctgcgaggcggacggcgcgggcagcttggctggcacagctgggctgcggggccgggcagcctgctggcttggctgatactggcatctgcgggcgccgcaccctgccccgatgcctgctgcccccacggctcctcgggactgcgatgcacccgggatggggccctggatagcctccaccacctgcccggcgcagagaacctgactgagctctacatcgagaaccagcagcatctgcagcatctggagctccgtgatctgaggggcctgggggagctgagaaacctcaccatcgtgaagagtggtctccgtttcgtggcgccagatgccttccatttcactcctcggctcagtcgcctgaatctctccttcaacgctctggagtctctctcctggaaaactgtgcagggcctctccttacaggaactggtcctgtcggggaaccctctgcactgttcttgtgccctgcgctggctacagcgctgggaggaggagggactgggcggagtgcctgaacagaagctgcagtgtcatgggcaagggcccctggcccacatgcccaatgccagctgtggtgtgcccacgctgaaggtccaggtgcccaatgcctcggtggatgtgggggacgacgtgctgctgcggtgccaggtggaggggcggggcctggagcaggccggctggatcctcacagagctggagcagtcagccacggtgatgaaatctgggggtctgccatccctggggctgaccctggccaatgtcaccagtgacctcaacaggaagaacgtgacgtgctgggcagagaacgatgtgggccgggcagaggtctctgttcaggtcaacgtctccttcccggccagtgtgcagctgcacacggcggtggagatgcaccactggtgcatccccttctctgtggatgggcagccggcaccgtctctgcgctggctcttcaatggctccgtgctcaatgagaccagcttcatcttcactgagttcctggagccggcagccaatgagaccgtgcggcacgggtgtctgcgcctcaaccagcccacccacgtcaacaacggcaactacacgctgctggctgccaaccccttcggccaggcctccgcctccatcatggctgccttcatggacaaccctttcgagttcaaccccgaggaccccatccctgtctccttctcgccggtggacactaacagcacatctggagacccggtggagaagaaggacgaaacaccttttggggtctcggtggctgtgggcctggccgtctttgcctgcctcttcctttctacgctgctccttgtgctcaacaaatgtggacggagaaacaagtttgggatcaaccgcccggctgtgctggctccagaggatgggctggccatgtccctgcatttcatgacattgggtggcagctccctgtcccccaccgagggcaaaggctctgggctccaaggccacatcatcgagaacccacaatacttcagtgatgcctgtgttcaccacatcaagcgccgggacatcgtgctcaagtgggagctgggggagggcgcctttgggaaggtcttccttgctgagtgccacaacctcctgcctgagcaggacaagatgctggtggctgtcaaggcactgaaggaggcgtccgagagtgctcggcaggacttccaacgtgaggctgagctgctcaccatgctgcagcaccagcacatcgtgcgcttcttcggcgtctgcaccgagggccgcccctgctcatggtcttcgagtatatgcggcacggggacctcaaccgcttcctccgatcccatggacccgatgccaagctgctggctggtggggaggatgtggctccaggccccctgggtctggggcagctgctggccgtggctagccaggtcgctgcggggatggtgtacctggcgggtctgcattttgtgcaccgggacctggccacacgcaactgtctagtgggccagggactggtggtcaagattggtgattttggcatgagcagggatatctacagcaccgactattaccgtgtgggaggccgcaccatgctgcccattcgctggatgccgcccgagagcatcctgtaccgtaagttcaccaccgagagcgacgtgtggagcttcggcgtggtgctctgggagatcttcacctacggcaagcagccctggtaccagctctccaacacggaggcaatcgactgcatcacgcagggacgtgagttggagcggccacgtgcctgcccaccagaggtctacgccatcatgcggggctgctggcagcgggagccccagcaacgccacagcatcaaggatgtgcacgcccggctgcaagccctggcccaggcacctcctgtctacctggatgtcctgggctag

SEQ ID NO: 464 - DNA, 2391 bp, Homo sapiens
atgctgcgaggcggacggcgcgggcagcttggctggcacagctgggctgcggggccgggcagcctgctggcttggctgatactggcatctgcgggcgccgcaccctgccccgatgcctgctgcccccacggctcctcgggactgcgatgcacccgggatggggccctggatagcctccaccacctgcccggcgcagagaacctgactgagctctacatcgagaaccagcagcatctgcagcatctggagctccgtgatctgaggggcctgggggagctgagaaacctcaccatcgtgaagagtggtctccgtttcgtggcgccagatgccttccatttcactcctcggctcagtcgcctgaatctctccttcaacgctctggagtctctctcctggaaaactgtgcagggcctctccttacaggaactggtcctgtcggggaaccctctgcactgttcttgtgccctgcgctggctacagcgctgggaggaggagggactgggcggagtgcctgaacagaagctgcagtgtcatgggcaagggcccctggcccacatgcccaatgccagctgtggtgtgcccacgctgaaggtccaggtgcccaatgcctcggtggatgtgggggacgacgtgctgctgcggtgccaggtggaggggcggggcctggagcaggccggctggatcctcacagagctggagcagtcagccacggtgatgaaatctgggggtctgccatccctggggctgaccctggccaatgtcaccagtgacctcaacaggaagaacgtgacgtgctgggcagagaacgatgtgggccgggcagaggtctctgttcaggtcaacgtctccttcccggccagtgtgcagctgcacacggcggtggagatgcaccactggtgcatccccttctctgtggatgggcagccggcaccgtctctgcgctggctcttcaatggctccgtgctcaatgagaccagcttcatcttcactgagttcctggagccggcagccaatgagaccgtgcggcacgggtgtctgcgcctcaaccagcccacccacgtcaacaacggcaactacacgctgctggctgccaaccccttcggccaggcctccgcctccatcatggctgccttcatggacaaccctttcgagttcaaccccgaggaccccatccctgtctccttctcgccggtggacactaacagcacatctggagacccggtggagaagaaggacgaaacaccttttggggtctcggtggctgtgggcctggccgtctttgcctgcctcttcctttctacgctgctccttgtgctcaacaaatgtggacggagaaacaagtttgggatcaaccgcccggctgtgctggctccagaggatgggctggccatgtccctgcatttcatgacattgggtggcagctccctgtcccccaccgagggcaaaggctctgggctccaaggccacatcatcgagaacccacaatacttcagtgatgcctgtgttcaccacatcaagcgccgggacatcgtgctcaagtgggagctgggggagggcgcctttgggaaggtcttccttgctgagtgccacaacctcctgcctgagcaggacaagatgctggtggctgtcaaggcactgaaggaggcgtccgagagtgctcggcaggacttccaacgtgaggctgagctgctcaccatgctgcagcaccagcacatcgtgcgcttcttcggcgtctgcaccgagggccgccccctgctcatggtcttcgagtatatgcggcacgaggacctcaaccgcttcctccgatcccatggacccgatgccaagctgctggctggtggggaggatgtggctccaggccccctgggtctggggcagctgctggccgtggctagccaggtcgctgcggggatggtgtacctggcgggtctgcattttgtgcaccgggacctggccacacgcaactgtctagtgggccagggactggtggtcaagattggtgattttggcatgagcagggatatctacagcaccgactattaccgtgtgggaggccgcaccatgctgcccattcgctggatgccgcccgagagcatcctgtaccgtaagttcaccaccgagagcgacgtgtggagcttcggcgtggtgctctgggagatcttcacctacggcaagcagccctggtaccagctctccaacacggaggcaatcgactgcatcacgcagggacgtgagttggagcggccacgtgcctgcccaccagaggtctacgccatcatgcggggctgctggcagcgggagccccagcaacgccacagcatcaaggatgtgcacgcccggctgcaagccctggcccaggcacctcctgtctacctggatgtcctgggctag

SEQ ID NO: 465 - DNA, 2391 bp, Homo sapiens
atgctgcgaggcggacggcgcgggcagcttggctggcacagctgggctgcggggccgggcagcctgctggcttggctgatactggcatctgcgggcgccgcaccctgccccgatgcctgctgcccccacggctcctcgggactgcgatgcacccgggatggggccctggatagcctccaccacctgcccggcgcagagaacctgactgagctctacatcgagaaccagcagcatctgcagcatctggagctccgtgatctgaggggcctgggggagctgagaaacctcaccatcgtgaagagtggtctccgtttcgtggcgccagatgccttccatttcactcctcggctcagtcgcctgaatctctccttcaacgctctggagtctctctcctggaaaactgtgcagggcctctccttacaggaactggtcctgtcggggaaccctctgcactgttcttgtgccctgcgctggctacagcgctgggaggaggagggactgggcggagtgcctgaacagaagctgcagtgtcatgggcaagggcccctggcccacatgcccaatgccagctgtggtgtgcccacgctgaaggtccaggtgcccaatgcctcggtggatgtgggggacgacgtgctgctgcggtgccaggtggaggggcggggcctggagcaggccggctggatcctcacagagctggagcagtcagccacggtgatgaaatctgggggtctgccatccctggggctgaccctggccaatgtcaccagtgacctcaacaggaagaacgtgacgtgctgggcagagaacgatgtgggccgggcagaggtctctgttcaggtcaacgtctccttcccggccagtgtgcagctgcacacggcggtggagatgcaccactggtgcatccccttctctgtggatgggcagccggcaccgtctctgcgctggctcttcaatggctccgtgctcaatgagaccagcttcatcttcactgagttcctggagccggcagccaatgagaccgtgcggcacgggtgtctgcgcctcaaccagcccacccacgtcaacaacggcaactacacgctgctggctgccaaccccttcggccaggcctccgcctccatcatggctgccttcatggacaaccctttcgagttcaaccccgaggaccccatccctgtctccttctcgccggtggacactaacagcacatctggagacccggtggagaagaaggacgaaacaccttttggggtctcggtggctgtgggcctggccgtctttgcctgcctcttcctttctacgctgctccttgtgctcaacaaatgtggacggagaaacaagtttgggatcaaccgcccggctgtgctggctccagaggatgggctggccatgtccctgcatttcatgacattgggtggcagctccctgtcccccaccgagggcaaaggctctgggctccaaggccacatcatcgagaacccacaatacttcagtgatgcctgtgttcaccacatcaagcgccgggacatcgtgctcaagtgggagctgggggagggcgcctttgggaaggtcttccttgctgagtgccacaacctcctgcctgagcaggacaagatgctggtggctgtcaaggcactgaaggaggcgtccgagagtgctcggcaggacttccaacgtgaggctgagctgctcaccatgctgcagcaccagcacatcgtgcgcttcttcggcgtctgcaccgagggccgccccctgctcatggtcttcgagtatatgcggcacggggacctcaaccgcttcctccgatcccatggacccgatgccaagctgctggctggtggggaggatgtggctccaggccccctgggtctggggcagctgctggccgtggctagccaggtcgctgcggggatggtgtacctggcgggtctgcattttgtgcaccgggacctggccacacgcaactgtctagtgggccagggactggtggtcaagattggtgattttggcatgagcagggatatctacagcaccgactattaccgtgtgggaggccgcaccatgctgcccattcgctggatgccgcccgagagcatcctgtaccgtaagttcaccaccgagagcgacgtgtggagcttcggcgtggtgctctgggagatcttcacctacggcaagcagccctggtaccagctctccaacacggaggcaatcgactgcatcacgcagggacgtgagttggagtggccacgtgcctgcccaccagaggtctacgccatcatgcggggctgctggcagcgggagccccagcaacgccacagcatcaaggatgtgcacgcccggctgcaagccctggcccaggcacctcctgtctacctggatgtcctgggctag

SEQ ID NO: 466 - DNA, 2517 bp, Homo sapiens
atgtcgtcctggataaggtggcatggacccgccatggcgcggctctggggcttctgctggctggttgtgggcttctggagggccgctttcgcctgtcccacgtcctgcaaatgcagtgcctctcggatctggtgcagcgacccttctcctggcatcgtggcatttccgagattggagcctaacagtgtagatcctgagaacatcaccgaaattttcatcgcaaaccagaaaaggttagaaatcatcaacgaagatgatgttgaagcttatgtgggactgagaaatctgacaattgtggattctggattaaaatttgtggctcataaagcatttctgaaaaacagcaacctgcagcacatcaattttacccgaaacaaactgacgagtttgtctaggaaacatttccgtcaccttgacttgtctgaactgatcctggtgggcaatccatttacatgctcctgtgacattatgtggatcaagactctccaagaggctaaatccagtccagacactcaggatttgtactgcctgaatgaaagcagcaagaatattcccctggcaaacctgcagatacccaattgtggtttgccatctgcaaatctggccgcacctaacctcactgtggaggaaggaaagtctatcacattatcctgtagtgtggcaggtgatccggttcctaatatgtattgggatgttggtaacctggtttccaaacatatgaatgaaacaagccacacacagggctccttaaggataactaacatttcatccgatgacagtgggaagcagatctcttgtgtggcggaaaatcttgtaggagaagatcaagattctgtcaacctcactgtgcattttgcaccaactatcacatttctcgaatctccaacctcagaccaccactggtgcattccattcactgtgaaaggcaaccccaaaccagcgcttcagtggttctataacggggcaatattgaatgagtccaaatacatctgtactaaaatacatgttaccaatcacacggagtaccacggctgcctccagctggataatcccactcacatgaacaatggggactacactctaatagccaagaatgagtatgggaaggatgagaaacagatttctgctcacttcatgggctggcctggaattgacgatggtgcaaacccaaattatcctgatgtaatttatgaagattatggaactgcagcgaatgacatcggggacaccacgaacagaagtaatgaaatcccttccacagacgtcactgataaaaccggtcgggaacatctctcggtctatgctgtggtggtgattgcgtctgtggtgggattttgccttttggtaatgctgtttctgcttaagttggcaagacactccaagtttggcatgaaagatttctcatggtttggatttgggaaagtaaaatcaagacaaggtgttggcccagcctccgttatcagcaatgatgatgactctgccagcccactccatcacatctccaatgggagtaacactccatcttcttcggaaggtggcccagatgctgtcattattggaatgaccaagatccctgtcattgaaaatccccagtactttggcatcaccaacagtcagctcaagccagacacatttgttcagcacatcaagcgacataacattgttctgaaaagggagctaggcgaaggagcctttggaaaagtgttcctagctgaatgctataacctctgtcctgagcaggacaagatcttggtggtagtgaagaccctgaaggatgccagtgacaatgcacgcaaggacttccaccgtgaggccgagctcctgaccaacctccagcatgagcacatcgtcaagttctatggcgtctgcgtggagggcgaccccctcatcatggtctttgagtacatgaagcatggggacctcaacaagttcctcagggcacacggccctgatgccgtgctgatggctgagggcaacccgcccacggaactgacgcagtcgcagatgctgcatatagcccagcagatcgccgcgggcatggtctacctggcgtcccagcacttcgtgcaccgcgatttggccaccaggaactgcctggtcggggagaacttgctggtgaaaatcggggactttgggatgtcccgggacgtgtacagcactgactactacagggtcggtggccacacaatgctgcccattcgctggatgcctccagagagcatcatgtacaggaaattcacgacggaaagcgacgtctggagcctgggggtcgtgttgtgggagattttcacctatggcaaacagccctggtaccagctgtcaaacaatgaggtgatagagtgtatcactcagggccgagtcctgcagcgaccccgcacgtgcccccaggaggtgtatgagctgatgctggggtgctggcagcgagagccccacatgaggaagaacatcaagggcatccataccctccttcagaacttggccaaggcatctccggtctacctggacattctaggctag

SEQ ID NO: 467 - DNA, 2517 bp, Homo sapiens
atgtcgtcctggataaggtggcatggacccgccatggcgcggctctggggcttctgctggctggttgtgggcttctggagggccgctttcgcctgtcccacgtcctgcaaatgcagtgcctctcggatctggtgcagcgacccttctcctggcatcgtggcatttccgagattggagcctaacagtgtagatcctgagaacatcaccgaaattttcatcgcaaaccagaaaaggttagaaatcatcaacgaagatgatgttgaagcttatgtgggactgagaaatctgacaattgtggattctggattaaaatttgtggctcataaagcatttctgaaaaacagcaacctgcagcacatcaattttacccgaaacaaactgacgagtttgtctaggaaacatttccgtcaccttgacttgtctgaactgatcctggtgggcaatccatttacatgctcctgtgacattatgtggatcaagactctccaagaggctaaatccagtccagacactcaggatttgtactgcctgaatgaaagcagcaagaatattcccctggcaaacctgcagatacccaattgtggtttgccatctgcaaatctggccgcacctaacctcactgtggaggaaggaaagtctatcacattatcctgtagtgtggcaggtgatccggttcctaatatgtattgggatgttggtaacctggtttccaaacatatgaatgaaacaagccacacacagggctccttaaggataactaacatttcatccgatgacagtgggaagcagatctcttgtgtggcggaaaatcttgtaggagaagatcaagattctgtcaacctcactgtgcattttgcaccaactatcacatttctcgaatctccaacctcagaccaccactggtgcattccattcactgtgaaaggcaaccccaaaccagcgcttcagtggttctataacggggcaatattgaatgagtccaaatacatctgtactaaaatacatgttaccaatcacacggagtaccacggctgcctccagctggataatcccactcacatgaacaatggggactacactctaatagccaagaatgagtatgggaaggatgagaaacagatttctgctcacttcatgggctggcctggaattgacgatggtgcaaacccaaattatcctgatgtaatttatgaagattatggaactgcagcgaatgacatcggggacaccacgaacagaagtaatgaaatcccttccacagacgtcactgataaaaccggtcgggaacatctctcggtctatgctgtggtggtgattgcgtctgtggtgggattttgccttttggtaatgctgtttctgcttaagttggcaagacactccaagtttggcatgaaagatttctcatggtttggatttgggaaagtaaaatcaagacaaggtgttggcccagcctccgttatcagcaatgatgatgactctgccagcccactccatcacatctccaatgggagtaacactccatcttcttcggaaggtggcccagatgctgtcattattggaatgaccaagatccctgtcattgaaaatccccagtactttggcatcaccaacagtcagctcaagccagacacatttgttcagcacatcaagcgacataacattgttctgaaaagggagctaggcgaaggagcctttggaaaagtgttcctagctgaatgctataacctctgtcctgagcaggacaagatcttggtggcagtgaagaccctgaaggatgccagtgacaatgcacgcaaggacttccaccgtgaggccgagctcctgaccaacctccagcatgagcacatcgtcaagttctatggcatctgcgtggagggcgaccccctcatcatggtctttgagtacatgaagcatggggacctcaacaagttcctcagggcacacggccctgatgccgtgctgatggctgagggcaacccgcccacggaactgacgcagtcgcagatgctgcatatagcccagcagatcgccgcgggcatggtctacctggcgtcccagcacttcgtgcaccgcgatttggccaccaggaactgcctggtcggggagaacttgctggtgaaaatcggggactttgggatgtcccgggacgtgtacagcactgactactacagggtcggtggccacacaatgctgcccattcgctggatgcctccagagagcatcatgtacaggaaattcacgacggaaagcgacgtctggagcctgggggtcgtgttgtgggagattttcacctatggcaaacagccctggtaccagctgtcaaacaatgaggtgatagagtgtatcactcagggccgagtcctgcagcgaccccgcacgtgcccccaggaggtgtatgagctgatgctggggtgctggcagcgagagccccacatgaggaagaacatcaagggcatccataccctccttcagaacttggccaaggcatctccggtctacctggacattctaggctag

SEQ ID NO: 468 - DNA, 2282 bp, Homo sapiens
atgtcgtcctggataaggtggcatggacccgccatggcgcggctctggggcttctgctggctggttgtgggcttctggagggccgctttcgcctgtcccacgtcctgcaaatgcagtgcctctcggatctggtgcagcgacccttctcctggcatcgtggcatttccgagattggagcctaacagtgtagatcctgagaacatcaccgaaattttcatcgcaaaccagaaaaggttagaaatcatcaacgaagatgatgttgaagcttatgtgggactgagaaatctgacaattgtggattctggattaaaatttgtggctcataaagcatttctgaaaaacagcaacctgcagcacatcaattttacccgaaacaaactgacgagtttgtctaggaaacatttccgtcaccttgacttgtctgaactgatcctggtgggcaatccatttacatgctcctgtgacattatgtggatcaagactctccaagaggctaaatccagtccagacactcaggatttgtactgcctgaatgaaagcagcaagaatattcccctggcaaacctgcagatacccaattgtggtttgccatctgcaaatctggccgcacctaacctcactgtggaggaaggaaagtctatcacattatcctgtagtgtggcaggtgatccggttcctaatatgtattgggatgttggtaacctggtttccaaacatatgaatgaaacaagccacacacagggctccttaaggataactaacatttcatccgatgacagtgggaagcagatctcttgtgtggcggaaaatcttgtaggagaagatcaagattctgtcaacctcactgtgcattttgcaccaactatcacatttctcgaatctccaacctcagaccaccactggtgcattccattcactgtgaaaggcaaccccaaaccagcgcttcagtggttctataacggggcaatattgaatgagtccaaatacatctgtactaaaatacatgttaccaatcacacggagtaccacggctgcctccagctggataatcccactcacatgaacaatggggactacactctaatagccaagaatgagtatgggaaggatgagaaacagatttctgctcacttcatgggctggcctggaattgacgatggtgcaaacccaaattatcctgatgtaatttatgaagattatggaactgcagcgaatgacatcggggacaccacgaacagaagtaatgaaatcccttccacagacgtcactgataaaaccggtcgggaacatctctcggtctatgctgtggtggtgattgcgtctgtggtgggattttgccttttggtaatgctgtttctgcttaagttggcaagacactccaagtttggcatgaaagatttctcatggtttggatttgggaaagtaaaatcaagacaaggtgttggcccagcctccgttatcagcaatgatgatgactctgccagcccactccatcacatctccaatgggagtaacactccatcttcttcggaaggtggcccagatgctgtcattattggaatgaccaagatccctgtcattgaaaatccccagtactttggcatcaccaacagtcagctcaagccagacacatttgttcagcacatcaagcgacataacattgttctgaaaagggagctaggcgaaggagcctttggaaaagtgttcctagctgaatgctataacctctgtcctgagcaggacaagatcttggtggcagtgaagaccctgaaggatgccagtgacaatgcacgcaaggacttccaccgtgaggccgagctcctgaccaacctccagcatgagcacatcgtcaagttctatggcgtctgcgtggagggcgaccccctcatcatggtctttgagtacatgaagcatggggacctcaacaagttcctcaggtcggtggccacacaatgctgcccattcgctggatgcctccagagagcatcatgtacaggaaattcacgacggaaagcgacgtctggagcctgggggtcgtgttgtgggagattttcacctatggcaaacagccctggtaccagctgtcaaacaatgaggtgatagagtgtatcactcagggccgagtcctgcagcgaccccgcacgtgcccccaggaggtgtatgagctgatgctggggtgctggcagcgagagccccacatgaggaagaacatcaagggcatccataccctccttcagaacttggccaaggcatctccggtctacctggacattctaggctag

SEQ ID NO: 469 - DNA, 2732 bp, Homo sapiens
atggatgtctctctttgcccagccaagtgtagtttctggcggattttcttgctgggaagcgtctggctggactatgtgggctccgtgctggcttgccctgcaaattgtgtctgcagcaagactgagatcaattgccggcggccggacgatgggaacctcttccccctcctggaagggcaggattcagggaacagcaatgggaacgccagtatcaacatcacggacatctcaaggaatatcacttccatacacatagagaactggcgcagtcttcacacgctcaacgccgtggacatggagctctacaccggacttcaaaagctgaccatcaagaactcaggacttcggagcattcagcccagagcctttgccaagaacccccatttgcgttatataaacctgtcaagtaaccggctcaccacactctcgtggcagctcttccagacgctgagtcttcgggaattgcagttggagcagaactttttcaactgcagctgtgacatccgctggatgcagctctggcaggagcagggggaggccaagctcaacagccagaacctctactgcatcaacgctgatggctcccagcttcctctcttccgcatgaacatcagtcagtgtgaccttcctgagatcagcgtgagccacgtcaacctgaccgtacgagagggtgacaatgctgttatcacttgcaatggctctggatcaccccttcctgatgtggactggatagtcactgggctgcagtccatcaacactcaccagaccaatctgaactggaccaatgttcatgccatcaacttgacgctggtgaatgtgacgagtgaggacaatggcttcaccctgacgtgcattgcagagaacgtggtgggcatgagcaatgccagtgttgccctcactgtctactatcccccacgtgtggtgagcctggaggagcctgagctgcgcctggagcactgcatcgagtttgtggtgcgtggcaaccccccaccaacgctgcactggctgcacaatgggcagcctctgcgggagtccaagatcatccatgtggaatactaccaagagggagagatttccgagggctgcctgctcttcaacaagcccacccactacaacaatggcaactataccctcattgccaaaaacccactgggcacagccaaccagaccatcaatggccacttcctcaaggagccctttccagagagcacggataactttatcttgtttgacgaagtgagtcccacacctcctatcactgtgacccacaaaccagaagaagacacttttggggtatccatagcagttggacttgctgcttttgcctgtgtcctgttggtggttctcttcgtcatgatcaacaaatatggtcgacggtccaaatttggaatgaagggtcccgtggctgtcatcagtggtgaggaggactcagccagcccactgcaccacatcaaccacggcatcaccacgccctcgtcactggatgccgggcccgacactgtggtcattggcatgactcgcatccctgtcattgagaacccccagtacttccgtcagggacacaactgccacaagccggacacgtactcagcacacacatgttagaaaacactgggttatagtgtgatcagaagcttttaaagaagaatcaagcaggatgtgttcgtcaaccacccacttcttatatcaagaaaccaccacacccagcacgctacccagctctaggctcagccctcacttctgccttctacgtagagtcagaaaaaattctggttgctgatggatagacactcttgtgaagatcaggaaaccttcgctgtgatatctcagaagaaaatgatgtgcagcacattaagaggagagacatcgtgctgaagcgagaactgggtgagggagcctttggaaaggtcttcctggccgagtgctacaacctcagcccgaccaaggacaagatgcttgtggctgtgaaggccctgaaggatcccaccctggctgcccggaaggatttccagagggaggccgagctgctcaccaacctgcagcatgagcacattgtcaagttctatggagtgtgcggcgatggggaccccctcatcatggtctttgaatacatgaagcatggagacctgaataagttcctcagggcccatgggccagatgcaatgatccttgtggatggacagccacgccaggccaagggtgagctggggctctcccaaatgctccacattgccagtcagatcgcctcgggtatggtgtacctggcctcccagcactttgtgcaccgagacctggccaccaggaactgcctggttggagcgaatctgctagtgaagattggggacttcggcatgtccagagatgtctacagcacggattattacagggtgggaggacacaccatgctccccattcgctggatgcctcctgaaagcatcatgtaccggaagttcactacagagagtgatgtatggagcttcggggtgatcctctgggagatcttcacctatggaaagcagccatggttccaactctcaaacacggaggtcattgagtgcattacccaaggtcgtgttttggagcggccccgagtctgccccaaagaggtgtacgatgtcatgctggggtgctggcagagggaaccacagcagcggttgaacatcaaggagatctacaaaatcctccatgctttggggaaggccaccccaatctacctggacattcttggctag

SEQ ID NO: 470 - DNA, 2478 bp, Homo sapiens
atggatgtctctctttgcccagccaagtgtagtttctggcggattttcttgctgggaagcgtctggctggactatgtgggctccgtgctggcttgccctgcaaattgtgtctgcagcaagactgagatcaattgccggcggccggacgatgggaacctcttccccctcctggaagggcaggattcagggaacagcaatgggaacgccagtatcaacatcacggacatctcaaggaatatcacttccatacacatagagaactggcgcagtcttcacacgctcaacgccgtggacatggagctctacaccggacttcaaaagctgaccatcaagaactcaggacttcggagcattcagcccagagcctttgccaagaacccccatttgcgttatataaacctgtcaagtaaccggctcaccacactctcgtggcagctcttccagacgctgagtcttcgggaattgcagttggagcagaactttttcaactgcagctgtgacatccgctggatgcagctctggcaggagcagggggaggccaagctcaacagccagaacctctactgcatcaacgctgatggctcccagcttcctctcttccgcatgaacatcagtcagtgtgaccttcctgagatcagcgtgagccacgtcaacctgaccgtacgagagggtgacaatgctgttatcacttgcaatggctctggatcaccccttcctgatgtggactggatagtcactgggctgcagtccatcaacactcaccagaccaatctgaactggaccaatgttcatgccatcaacttgacgctggtgaatgtgacgagtgaggacaatggcttcaccctgacgtgcattgcagagaacgtggtgggcatgagcaatgccagtgttgccctcactgtctactatcccccacgtgtggtgagcctggaggagcctgagctgcgcctggagcactgcatcgagtttgtggtgcgtggcaaccccccaccaacgctgcactggctgcacaatgggcagcctctgcgggagtccaagatcatccatgtggaatactaccaagagggagagatttccgagggctgcctgctcttcaacaagcccacccactacaacaatggcaactataccctcattgccaaaaacccactgggcacagccaaccagaccatcaatggccacttcctcaaggagccctttccagagagcacggataactttatcttgtttgacgaagtgagtcccacacctcctatcactgtgacccacaaaccagaagaagacacttttggggtatccatagcagttggacttgctgcttttgcctgtgtcctgttggtggttctcttcgtcatgatcaacaaatatggtcgacggtccaaatttggaatgaagggtcccgtggctgtcatcagtggtgaggaggactcagccagcccactgcaccacatcaaccacggcatcaccacgccctcgtcactggatgccgggcccgacactgtggtcattggcatgactcgcatccctgtcattgagaacccccagtacttccgtcagggacacaactgccacaagccggacacgtatgtgcagcacattaagaggagagacatcgtgctgaagcgagaactgggtgagggagcctttggaaaggtcttcctggccgagtgctacaacctcagcccgaccaaggacaagatgcttgtggctgtgaaggccctgaaggatcccaccctggctgcccggaaggatttccagagggaggccgagctgctcaccaacctgcagcatgagcacattgtcaagttctatggagtgtgcgacgatggggaccccctcatcatggtctttgaatacatgaagcatggagacctgaataagttcctcagggcccatgggccagatgcaatgatccttgtggatggacagccacgccaggccaagggtgagctggggctctcccaaatgctccacattgccagtcagatcgcctcgggtatggtgtacctggcctcccagcactttgtgcaccgagacctggccaccaggaactgcctggttggagcgaatctgctagtgaagattggggacttcggcatgtccagagatgtctacagcacggattattacagggtgggaggacacaccatgctccccattcgctggatgcctcctgaaagcatcatgtaccggaagttcactacagagagtgatgtatggagcttcggggtgatcctctgggagatcttcacctatggaaagcagccatggttccaactctcaaacacggaggtcattgagtgcattacccaaggtcgtgttttggagcggccccgagtctgccccaaagaggtgtacgatgtcatgctggggtgctggcagagggaaccacagcagcggttgaacatcaaggagatctacaaaatcctccatgctttggggaaggccaccccaatctacctggacattcttggctag

SEQ ID NO: 471 - DNA, 2234 bp, Homo sapiens
atggatgtctctctttgcccagccaagtgtagtttctggcggattttcttgctgggaagcgtctggctggactatgtgggctccgtgctggcttgccctgcaaattgtgtctgcagcaagactgagatcaattgccggcggccggacgatgggaacctcttccccctcctggaagggcaggattcagggaacagcaatgggaacgccagtatcaacatcacggacatctcaaggaatatcacttccatacacatagagaactggcgcagtcttcacacgctcaacgccgtggacatggagctctacaccggacttcaaaagctgaccatcaagaactcaggacttcggagcattcagcccagagcctttgccaagaacccccatttgcgttatataaacctgtcaagtaaccggctcaccacactctcgtggcagctcttccagacgctgagtcttcgggaattgcagttggagcagaactttttcaactgcagctgtgacatccgctggatgcagctctggcaggagcagggggaggccaagctcaacagccagaacctctactgcatcaacgctgatggctcccagcttcctctcttccgcatgaacatcagtcagtgtgaccttcctgagatcagcgtgagccacgtcaacctgaccgtacgagagggtgacaatgctgttatcacttgcaatggctctggatcaccccttcctgatgtggactggatagtcactgggctgcagtccatcaacactcaccagaccaatctgaactggaccaatgttcatgccatcaacttgacgctggtgaatgtgacgagtgaggacaatggcttcaccctgacgtgcattgcagagaacgtggtgggcatgagcaatgccagtgttgccctcactgtctactatcccccacgtgtggtgagcctggaggagcctgagctgcgcctggagcactgcatcgagtttgtggtgcgtggcaaccccccaccaacgctgcactggctgcacaatgggcagcctctgcgggagtccaagatcatccatgtggaatactaccaagagggagagatttccgagggctgcctgctcttcaacaagcccacccactacaacaatggcaactataccctcattgccaaaaacccactgggcacagccaaccagaccatcaatggccacttcctcaaggagccctttccagagagcacggataactttatcttgtttgacgaagtgagtcccacacctcctatcactgtgacccacaaaccagaagaagacacttttggggtatccatagcagttggacttgctgcttttgcctgtgtcctgttggtggttctcttcgtcatgatcaacaaatatggtcgacggtccaaatttggaatgaagggtcccgtggctgtcatcagtggtgaggaggactcagccagcccactgcaccacatcaaccacggcatcaccacgccctcgtcactggatgccgggcccgacactgtggtcattggcatgactcgcatccctgtcattgagaacccccagtacttccgtcagggacacaactgccacaagccggacacgtatgtgcagcacattaagaggagagacatcgtgctgaagcgagaactgggtgagggagcctttggaaaggtcttcctggccgagtgctacaacctcagcccgaccaaggacaagatgcttgtggctgtgaaggccctgaaggatcccaccctggctgcccggaaggatttccagagggaggccgagctgctcaccaacctgcagcatgagcacattgtcaagttctatggagtgtgcggcgatggggaccccctcatcatggtctttgaatacatgaagcatggagacctgaataagttcctcaggtgggaggacacaccatgctccccattcgctggatgcctcctgaaagcatcatgtaccggaagttcactacagagagtgatgtatggagcttcggggtgatcctctgggagatcttcacctatggaaagcagccatggttccaactctcaaacacggaggtcattgagtgcattacccaaggtcgtgttttggagcggccccgagtctgccccaaagaggtgtacgatgtcatgctggggtgctggcagagggaaccacagcagcggttgaacatcaaggagatctacaaaatcctccatgctttggggaaggccaccccaatctacctggacattcttggctag

SEQ ID NO: 472 - DNA, 3270 bp, Homo sapiens
atggggacttcccatccggcgttcctggtcttaggctgtcttctcacagggctgagcctaatcctctgccagctttcattaccctctatccttccaaatgaaaatgaaaaggttgtgcagctgaattcatccttttctctgagatgctttggggagagtgaagtgagctggcagtaccccatgtctgaagaagagagctccgatgtggaaatcagaaatgaagaaaacaacagcgacctttttgtgacggtcttggaagtgagcagtgcctcggcggcccacacagggttgtacacttgctattacaaccacactcagacagaagagaatgagcttgaaggcaggcacatttacatctatgtgccagacccagatgtagcctttgtacctctaggaatgacggattatttagtcatcgtggaggatgatgattctgccattataccttgtcgcacaactgatcccgagactcctgtaaccttacacaacagtgagggggtggtacctgcctcctacgacagcagacagggctttaatgggaccttcactgtagggccctatatctgtgaggccaccgtcaaaggaaagaagttccagaccatcccatttaatgtttatgctttaaaagcaacatcagagctggatctagaaatggaagctcttaaaaccgtgtataagtcaggggaaacgattgtggtcacctgtgctgtttttaacaatgaggtggttgaccttcaatggacttaccctggagaagtgaaaggcaaaggcatcacaatgctggaagaaatcaaagtcccatccatcaaattggtgtacactttgacggtccccgaggccacggtgaaagacagtggagattacgaatgtgctgcccgccaggctaccagggaggtcaaagaaatgaagaaagtcactatttctgtccatgagaaaggtttcattgaaatcaaacccaccttcagccagttggaagctgtcaacctgcatgaagtcaaacattttgttgtagaggtgcgggcctacccacctcccaggatatcctggctgaaaaacaatctgactctgattgaaaatctcactgagatcaccactgatgtggaaaagattcaggaaataaggtatcgaagcaaattaaagctgatccgtgctaaggaagaagacagtggccattatactattgtagctcaaaatgaagatgctgtgaagagctatacttttgaactgttaactcaagttccttcatccattctggacttggtcgatgatcaccatggctcaactgggggacagacggtgaggtgcacagctgaaggcacgccgcttcctgatattgagtggatgatatgcaaagatattaagaaatgtaataatgaaacttcctggactattttggccaacaatgtctcaaacatcatcacggagatccactcccgagacaggagtaccgtggagggccgtgtgactttcgccaaagtggaggagaccatcgccgtgcgatgcctggctaagaatctccttggagctgagaaccgagagctgaagctggtggctcccaccctgcgttctgaactcacggtggctgctgcagtcctggtgctgttggtgattgtgatcatctcacttattgtcctggttgtcatttggaaacagaaaccgaggtatgaaattcgctggagggtcattgaatcaatcagcccagatggacatgaatatatttatgtggacccgatgcagctgccttatgactcaagatgggagtttccaagagatggactagtgcttggtcgggtcttggggtctggagcgtttgggaaggtggttgaaggaacagcctatggattaagccggtcccaacctgtcatgaaagttgcagtgaagatgctaaaacccacggccagatccagtgaaaaacaagctctcatgtctgaactgaagataatgactcacctggggccacatttgaacattgtaaacttgctgggagcctgcaccaagtcaggccccatttacatcatcacagagtattgcttctatggagatttggtcaactatttgcataagaatagggatagcttcctgagccaccacccagagaagccaaagaaagagctggatatctttggattgaaccctgctgatgaaagcacacggagctatgttattttatcttttgaaaacaatggtgactacatggacatgaagcaggctgatactacacagtatgtccccatgctagaaaggaaagaggtttctaaatattccgacatccagagatcactctatgatcgtccagcctcatataagaagaaatctatgttagactcagaagtcaaaaacctcctttcagatgataactcagaaggccttactttattggatttgttgagcttcacctatcaagttgcccgaggaatggagtttttggcttcaaaaaattgtgtccaccgtgatctggctgctcgcaacgtcctcctggcacaaggaaaaattgtgaagatctgtgactttggcctggccagagacatcatgcatgattcgaactatgtgtcgaaaggcagtacctttctgcccgtgaagtggatggctcctgagagcatctttgacaacctctacaccacactgagtgatgtctggtcttatggcattctgctctgggagatcttttcccttggtggcaccccttaccccggcatgatggtggattctactttctacaataagatcaagagtgggtaccggatggccaagcctgaccacgctaccagtgaagtctacgagatcatggtgaaatgctggaacagtgagccggagaagagaccctccttttaccacctgagtgagattgtggagaatctgctgcctggacaatataaaaagagttatgaaaaaattcacctggacttcctgaagagtgaccatcctgctgtggcacgcatgcgtgtggactcagacaatgcatacattggtgtcacctacaaaaacgaggaagacaagctgaaggactgggagggtggtctggatgagcagagactgagcgctgacagtggctacatcattcctctgcctgacattgaccctgtccctgaggaggaggacctgggcaagaggaacagacacagctcgcagacctctgaagagagtgccattgagacgggttccagcagttccaccttcatcaagagagaggacgagaccattgaagacatcgacatgatggacgacatcggcatagactcttcagacctggtggaagacagcttcctgtaa

SEQ ID NO: 473 - DNA, 1155 bp, Homo sapiens
atgacgcgccggggccggcggaggagcagccacttcctggggccgccggccggggccgctggctgcactcagcgccggagccgggagctagcggccgccgccatgtcccaccagaccggcatccaagcaagtgaagatgttaaagagatctttgccagagccagaaatggaaagtacagacttctgaaaatatctattgaaaatgagcaacttgtgattggatcatatagtcagccttcagattcctgggataaggattatgattcctttgttttacccctgttggaggacaaacaaccatgctatatattattcaggttagattctcagaatgcccagggatatgaatggatattcattgcatggtctccagatcattctcatgttcgtcaaaaaatgttgtatgcagcaacaagagcaactctgaagaaggaatttggaggtggccacattaaagatgaagtatttggaacagtaaaggaagatgtatcattacatggatataaaaaatacttgctgtcacaatcttcccctgccccactgactgcagctgaggaagaactacgacagattaaaatcaatgaggtacagactgacgtgggtgtggacactaagcatcaaacactacaaggagtagcatttcccatttctcgagaagcctttcaggctttggaaaaattgaataatagacagctcaactatgtgcagttggaaatagatataaaaaatgaaattataattttggccaacacaacaaatacagaactgaaagagttgccaaagaggattcccaaggattcagctcgttaccatttctttctgtataaacattcccatgaaggagactatttagagtccatagtttttatttattcaatgcctggatacacatgcagtataagagagcggatgctgtattctagctgcaagagccgtctgctagaaattgtagaaagacaactacaaatggatgtaattagaaagatcgagatagacaatggggatgagttgactgcagacttcctttatgaagaagtacatcccaagcagcatgcacacaagcaaagttttgcaaaaccaaaaggtcctgcaggaaaaagaggaattcgaagactaattaggggcccagcggaaactgaagctactactgattaa

SEQ ID NO: 474 - DNA, 1155 bp, Homo sapiens
atgacgcgccggggccggcggaggagcagccacttcctggggccgccggccggggccgctggctgcactcagcgccggagccgggagctagcggccgccgccatgtcccaccagaccggcatccaagcaagtgaagatgttaaagagatctttgccagagccagaaatggaaagtacagacttctgaaaatatctattgaaaatgagcaacttgtgattggatcatatagtcagccttcagattcctgggataaggattatgattcctttgttttacccctgttggaggacaaacaaccatgctatatattattcaggttagattctcagaatgcccagggatatgaatggatattcattgcatggtctccagatcattctcatgttcgtcaaaaaatgttgtatgcagcaacaagagcaactctgaagaaggaatttggaggtggccacattaaagatgaagtatttggaacagtaaaggaagatgtatcattacatggatataaaaaatacttgctgtcacaatcttcccctgccccactgactgcagctgaggaagaactacgacagattaaaatcaatgaggtacagactgacgtgggtgtggacactaagcatcaaacactacaaggagtagcatttcccatttctcgagaagcctttcaggctttggaaaaattgaataatagacagctcaactatgtgcagttggaaatagatataaaaaatgaaattataattttggccaacacaacaaatacagaactgaaagatttgccaaagaggattcccagggattcagctcgttaccatttctttctgtataaacattcccatgaaggagactatttagagtccatagtttttatttattcaatgcctggatacacatgcagtataagagagcggatgctgtattctagctgcaagagccgtctgctagaaattgtagaaagacaactacaaatggatgtaattagaaagatcgagatagacaatggggatgagttgactgcagacttcctttatgaagaagtacatcccaagcagcatgcacacaagcaaagttttgcaaaaccaaaaggtcctgcaggaaaaagaggaattcgaagactaattaggggcccagcggaaactgaagctactactgattaa

SEQ ID NO: 475 - DNA, 1155 bp, Homo sapiens
atgacgcgccggggccggcggaggagcagccacttcctggggccgccggccggggccgctggctgcactcagcgccggagccgggagctagcggccgccgccatgtcccaccagaccggcatccaagcaagtgaagatgttaaagagatctttgccagagccagaaatggaaagtacagacttctgaaaatatctattgaaaatgagcaacttgtgattggatcatatagtcagccttcagattcctgggataaggattatgattcctttgttttacccctgttggaggacaaacaaccatgctatatattattcaggttagattctcagaatgcccagggatatgaatggatattcattgcatggtctccagatcattctcatgttcgtcaaaaaatgttgtatgcagcaacaagagcaactctgaagaaggaatttggaggtggccacattaaagatgaagtatttggaacagtaaaggaagatgtatcattacatggatataaaaaatacttgctgtcacaatcttcccctgccccactgactgcagctgaggaagaactacgacagattaaaatcaatgaggtacagactgacgtgggtgtggacactaagcatcaaacactacaaggagtagcatttcccatttctcgagaagcctttcaggctttggaaaaattgaataatagacagctcaactatgtgcagttggaaatagatataaaaaatgaaattataattttggccaacacaacaaatacagaactgaaagatttgccaaagaggattcccaaggattcagctcgttaccatttctttctgtataaacattcccatgaaggagactatttagagtccatagtttttatttattcaatgcctggatacacatgcagtataagagagcggatgctgtattctagctgcaagagccgtctgctagaaattgtagaaagacaactacaaatggatgtaattagaaagatcgagatagacagtggggatgagttgactgcagacttcctttatgaagaagtacatcccaagcagcatgcacacaagcaaagttttgcaaaaccaaaaggtcctgcaggaaaaagaggaattcgaagactaattaggggcccagcggaaactgaagctactactgattaa

SEQ ID NO: 476 - DNA, 3030 bp, Homo sapiens
atgtctggggtgtccgagcccctgattcgagtaaagttgggcacgttacgccggcctgaaggccctgcagagcccatggtggtggtaccagtagatgtggaaaaggaggacgtgcgtatcctcaaggtctgcttctatagcaacagcttcaatcctgggaaaaacttcaaactggtcaaatgcactgtccagacggagatccgggagatcatcacctccatcctgctgagcgggcggatcgggcccaacatccggttggctgagtgctatgggctgaggctgaagcacatgaagtccgatgagatccactggctgcacccacagatgacggtgggtgaggtgcaggacaagtatgagtgtctgcacgtggaagccgagtggaggtatgaccttcaaatccgctacttgccagaagacttcatggagagcctgaaggaggacaggaccacgctgctctatttttaccaacagctccggaacgactacatgcagcgctacgccagcaaggtcagcgagggcatggccctgcagctgggctgcctggagctcaggcggttcttcaaggatatgccccacaatgcacttgacaagaagtccaacttcgagctcctagaaaaggaagtggggctggacttgtttttcccaaagcagatgcaggagaacttaaagcccaaacagttccggaagatgatccagcagaccttccagcagtacgcctcgctcagggaggaggagtgcgtcatgaagttcttcaacactctcgccggcttcgccaacatcgaccaggagacctaccgctgtgaactcattcaaggatggaacattactgtggacctggtcattggccctaaagggatccgccagctgactagtcaggacgcaaagcccacctgcctggccgagttcaagcagatcaggtccatcaggtgcctcccgctggaggagggccaggcagtacttcagctgggcattgaaggtgccccccaggccttgtccatcaaaacctcatccctagcagaggctgagaacatggctgacctcatagacggctactgccggctgcagggtgagcaccaaggctctctcatcatccatcctaggaaagatggtgagaagcggaacagcctgccccagatccccatgctaaacctggaggcccggcggtcccacctctcagagagctgcagcatagagtcagacatctacgcagagattcccgacgaaaccctgcgaaggcccggaggtccacagtatggcattgcccgtgaagatgtggtcctgaatcgtattcttggggaaggcttttttggggaggtctatgaaggtgtctacacaaatcacaaaggggagaaaatcaatgtagctgtcaagacctgcaagaaagactgcactctggacaacaaggagaagttcatgagcgaggcagtgatcatgaagaacctcgaccacccgcacatcgtgaagctgatcggcatcattgaagaggagcccacctggatcatcatggaattgtatccctatggggagctgggccactacctggagcggaacaagaactccctgaaggtgctcaccctcgtgctgtactcactgcagatatgcaaagccatggcctacctggagagcatcaactgcgtgcacagggacattgctgtccggaacatcctggtggcctcccctgagtgtgtgaagctgggggactttggtctttcccggtacattgaggacgaggactattacaaagcctctgtgactcgtctccccatcaaatggatgtccccagagtccattaacttccgacgcttcacgacagccagtgacgtctggatgttcgccgtgtgcatgtgggagatcctgagctttgggaagcagcccttcttctggctggagaacaaggatgtcatcggggtgctggagaaaggagaccggctgcccaagcctgatctctgtccaccggtcctttataccctcatgacccgctgctgggactacgaccccagtgaccggccccgcttcaccgagctggtgtgcagcctcagtgacgtttatcagatggagaaggacattgccatggagcaagagaggaatgctcgctaccgaacccccaaaatcttggagcccacagccttccaggaacccccacccaagcccagccgacctaagtacagaccccctccgcaaaccaacctcctggctccaaagctgcagttccaggttcctgagggtctgtgtgccagctctcctacgctcaccagccctatggagtatccatctcccgttaactcactgcacaccccacctctccaccggcacaatgtcttcaaacgccacagcatgcgggaggaggacttcatccaacccagcagccgagaagaggcccagcagctgtgggaggctgaaaaggtcaaaatgcggcaaatcctggacaaacagcagaagcagatggtggaggactaccagtggctcaggcaggaggagaagtccctggaccccatggtttatatgaatgataagtccccattgacgccagagaaggaggtcggctacctggagttcacagggcccccacagaagcccccgaggctgggcgcacagtccatccagcccacagctaacctggaccggactgatgacctggtgtacctcaatgtcatggagctggtgcgggccgtgctggagctcaagaatgagctctgtcagctgccccccgagggctacgtggtggtggtgaagaatgtggggctgaccctgcggaagctcatcgggagcgtggatgatctcctgccttccttgccgtcatcttcacggacagagatcgagggcacccagaaactgctcaacaaagacctggcagagctcatcaacaagatgcggctggcacagcagaacgccgtgacctccctaagtgaggagtgcaagaggcagatgctgacggcttcacacaccctggctgtggacgccaagaacctgctcgacgctgtggaccaggccaaggttctggccaatctggcccacccacctgcagagtga

SEQ ID NO: 477 - DNA, 3030 bp, Homo sapiens
atgtctggggtgtccgagcccctgagtcgagtaaagttgggcacgttacgccggcctgaaggccctgcagagcccatggtggtggtaccagtagatgtggaaaaggaggacgtgcgtatcctcaaggtctgcttctatagcaacagcttcaatcctgggaaaaacttcaaactggtcaaatgcactgtccagacggagatccgggagatcatcacctccatcctgctgagcgggcggatcgggcccaacatccggttggctgagtgctatgggctgaggctgaagcacatgaagtccgatgagatccactggctgcacccacagatgacggtgggtgaggtgcaggacaagtatgagtgtctgcacgtggaagccgagtggaggtatgaccttcaaatccgctacttgccagaagacttcatggagagcctgaaggaggacaggaccacgctgctctatttttaccaacagctccggaacgactacatgcagcgctacgccagcaaggtcagcgagggcatggccctgcagctgggctgcctggagctcaggcggttcttcaaggatatgccccacaatgcacttgacaagaagtccaacttcgagctcctagaaaaggaagtggggctggacttgtttttcccaaagcagatgcaggagaacttaaagcccaaacagttccggaagatgatccagcagaccttccagcagtacgcctcgctcagggaggaggagtgcgtcatgaagttcttcaacactctcgccggcttcgccaacatcgaccaggagacctaccgctgtgaactcattcaaggatggaacattactgtggacctggtcattggccctaaagggatccgccagctgactagtcaggacgcaaagcccacctgcctggccgagttcaagcagatcaggtccatcaggtgcctcccgctggaggagggccaggcagtacttcagctgggcattgaaggtgccccccaggccttgtccatcaaaacctcatccctagcagaggctgagaacatggctgacctcatagacggctactgccggctgcagggtgagcaccaaggctctctcatcatccatcctaggaaagatggtgagaagcggaacagcctgccccagatccccatgctaaacctggaggcccggcggtcccacctctcagagagctacagcatagagtcagacatctacgcagagattcccgacgaaaccctgcgaaggcccggaggtccacagtatggcattgcccgtgaagatgtggtcctgaatcgtattcttggggaaggcttttttggggaggtctatgaaggtgtctacacaaatcacaaaggggagaaaatcaatgtagctgtcaagacctgcaagaaagactgcactctggacaacaaggagaagttcatgagcgaggcagtgatcatgaagaacctcgaccacccgcacatcgtgaagctgatcggcatcattgaagaggagcccacctggatcatcatggaattgtatccctatggggagctgggccactacctggagcggaacaagaactccctgaaggtgctcaccctcgtgctgtactcactgcagatatgcaaagccatggcctacctggagagcatcaactgcgtgcacagggacattgctgtccggaacatcctggtggcctcccctgagtgtgtgaagctgggggactttggtctttcccggtacattgaggacgaggactattacaaagcctctgtgactcgtctccccatcaaatggatgtccccagagtccattaacttccgacgcttcacgacagccagtgacgtctggatgttcgccgtgtgcatgtgggagatcctgagctttgggaagcagcccttcttctggctggagaacaaggatgtcatcggggtgctggagaaaggagaccggctgcccaagcctgatctctgtccaccggtcctttataccctcatgacccgctgctgggactacgaccccagtgaccggccccgcttcaccgagctggtgtgcagcctcagtgacgtttatcagatggagaaggacattgccatggagcaagagaggaatgctcgctaccgaacccccaaaatcttggagcccacagccttccaggaacccccacccaagcccagccgacctaagtacagaccccctccgcaaaccaacctcctggctccaaagctgcagttccaggttcctgagggtctgtgtgccagctctcctacgctcaccagccctatggagtatccatctcccgttaactcactgcacaccccacctctccaccggcacaatgtcttcaaacgccacagcatgcgggaggaggacttcatccaacccagcagccgagaagaggcccagcagctgtgggaggctgaaaaggtcaaaatgcggcaaatcctggacaaacagcagaagcagatggtggaggactaccagtggctcaggcaggaggagaagtccctggaccccatggtttatatgaatgataagtccccattgacgccagagaaggaggtcggctacctggagttcacagggcccccacagaagcccccgaggctgggcgcacagtccatccagcccacagctaacctggaccggactgatgacctggtgtacctcaatgtcatggagctggtgcgggccgtgctggagctcaagaatgagctctgtcagctgccccccgagggctacgtggtggtggtgaagaatgtggggctgaccctgcggaagctcatcgggagcgtggatgatctcctgccttccttgccgtcatcttcacggacagagatcgagggcacccagaaactgctcaacaaagacctggcagagctcatcaacaagatgcggctggcacagcagaacgccgtgacctccctaagtgaggagtgcaagaggcagatgctgacggcttcacacaccctggctgtggacgccaagaacctgctcgacgctgtggaccaggccaaggttctggccaatctggcccacccacctgcagagtga

SEQ ID NO: 478 - DNA, 3030 bp, Homo sapiens
atgtctggggtgtccgagcccctgagtcgagtaaagttgggcacgttacgccggcctgaaggccctgcagagcccatggtggtggtaccagtagatgtggaaaaggaggacgtgcgtatcctcaaggtctgcttctatagcaacagcttcaatcctgggaaaaacttcaaactggtcaaatgcactgtccagacggagatccgggagatcatcacctccatcctgctgagcgggcggatcgggcccaacatccggttggctgagtgctatgggctgaggctgaagcacatgaagtccgatgagatccactggctgcacccacagatgacggtgggtgaggtgcaggacaagtatgagtgtctgcacgtggaagccgagtggaggtatgaccttcaaatccgctacttgccagaagacttcatggagagcctgaaggaggacaggaccacgctgctctatttttaccaacagctccggaacgactacatgcagcgctacgccagcaaggtcagcgagggcatggccctgcagctgggctgcctggagctcaggcggttcttcaaggatatgccccacaatgcacttgacaagaagtccaacttcgagctcctagaaaaggaagtggggctggacttgtttttcccaaagcagatgcaggagaacttaaagcccaaacagttccggaagatgatccagcagaccttccagcagtacgcctcgctcagggaggaggagtgcgtcatgaagttcttcaacactctcgccggcttcgccaacatcgaccaggagacctaccgctgtgaactcattcaaggatggaacattactgtggacctggtcattggccctaaagggatccgccagctgactagtcaggacgcaaagcccacctgcctggccgagttcaagcagatcaggtccatcaggtgcctcccgctggaggagggccaggcagtacttcagctgggcattgaaggtgccccccaggccttgtccatcaaaacctcatccctagcagaggctgagaacatggctgacctcatagacggctactgccggctgcagggtgagcaccaaggctctctcatcatccatcctaggaaagatggtgagaagcggaacagcctgccccagatccccatgctaaacctggaggcccggcggtcccacctctcagagagctgcagcatagagtcagacatctacgcacagattcccgacgaaaccctgcgaaggcccggaggtccacagtatggcattgcccgtgaagatgtggtcctgaatcgtattcttggggaaggcttttttggggaggtctatgaaggtgtctacacaaatcacaaaggggagaaaatcaatgtagctgtcaagacctgcaagaaagactgcactctggacaacaaggagaagttcatgagcgaggcagtgatcatgaagaacctcgaccacccgcacatcgtgaagctgatcggcatcattgaagaggagcccacctggatcatcatggaattgtatccctatggggagctgggccactacctggagcggaacaagaactccctgaaggtgctcaccctcgtgctgtactcactgcagatatgcaaagccatggcctacctggagagcatcaactgcgtgcacagggacattgctgtccggaacatcctggtggcctcccctgagtgtgtgaagctgggggactttggtctttcccggtacattgaggacgaggactattacaaagcctctgtgactcgtctccccatcaaatggatgtccccagagtccattaacttccgacgcttcacgacagccagtgacgtctggatgttcgccgtgtgcatgtgggagatcctgagctttgggaagcagcccttcttctggctggagaacaaggatgtcatcggggtgctggagaaaggagaccggctgcccaagcctgatctctgtccaccggtcctttataccctcatgacccgctgctgggactacgaccccagtgaccggccccgcttcaccgagctggtgtgcagcctcagtgacgtttatcagatggagaaggacattgccatggagcaagagaggaatgctcgctaccgaacccccaaaatcttggagcccacagccttccaggaacccccacccaagcccagccgacctaagtacagaccccctccgcaaaccaacctcctggctccaaagctgcagttccaggttcctgagggtctgtgtgccagctctcctacgctcaccagccctatggagtatccatctcccgttaactcactgcacaccccacctctccaccggcacaatgtcttcaaacgccacagcatgcgggaggaggacttcatccaacccagcagccgagaagaggcccagcagctgtgggaggctgaaaaggtcaaaatgcggcaaatcctggacaaacagcagaagcagatggtggaggactaccagtggctcaggcaggaggagaagtccctggaccccatggtttatatgaatgataagtccccattgacgccagagaaggaggtcggctacctggagttcacagggcccccacagaagcccccgaggctgggcgcacagtccatccagcccacagctaacctggaccggactgatgacctggtgtacctcaatgtcatggagctggtgcgggccgtgctggagctcaagaatgagctctgtcagctgccccccgagggctacgtggtggtggtgaagaatgtggggctgaccctgcggaagctcatcgggagcgtggatgatctcctgccttccttgccgtcatcttcacggacagagatcgagggcacccagaaactgctcaacaaagacctggcagagctcatcaacaagatgcggctggcacagcagaacgccgtgacctccctaagtgaggagtgcaagaggcagatgctgacggcttcacacaccctggctgtggacgccaagaacctgctcgacgctgtggaccaggccaaggttctggccaatctggcccacccacctgcagagtga

SEQ ID NO: 479 - DNA, 3030 bp, Homo sapiens
atgtctggggtgtccgagcccctgagtcgagtaaagttgggcacgttacgccggcctgaaggccctgcagagcccatggtggtggtaccagtagatgtggaaaaggaggacgtgcgtatcctcaaggtctgcttctatagcaacagcttcaatcctgggaaaaacttcaaactggtcaaatgcactgtccagacggagatccgggagatcatcacctccatcctgctgagcgggcggatcgggcccaacatccggttggctgagtgctatgggctgaggctgaagcacatgaagtccgatgagatccactggctgcacccacagatgacggtgggtgaggtgcaggacaagtatgagtgtctgcacgtggaagccgagtggaggtatgaccttcaaatccgctacttgccagaagacttcatggagagcctgaaggaggacaggaccacgctgctctatttttaccaacagctccggaacgactacatgcagcgctacgccagcaaggtcagcgagggcatggccctgcagctgggctgcctggagctcaggcggttcttcaaggatatgccccacaatgcacttgacaagaagtccaacttcgagctcctagaaaaggaagtggggctggacttgtttttcccaaagcagatgcaggagaacttaaagcccaaacagttccggaagatgatccagcagaccttccagcagtacgcctcgctcagggaggaggagtgcgtcatgaagttcttcaacactctcgccggcttcgccaacatcgaccaggagacctaccgctgtgaactcattcaaggatggaacattactgtggacctggtcattggccctaaagggatccgccagctgactagtcaggacgcaaagcccacctgcctggccgagttcaagcagatcaggtccatcaggtgcctcccgctggaggagggccaggcagtacttcagctgggcattgaaggtgccccccaggccttgtccatcaaaacctcatccctagcagaggctgagaacatggctgacctcatagacggctactgccggctgcagggtgagcaccaaggctctctcatcatccatcctaggaaagatggtgagaagcggaacagcctgccccagatccccatgctaaacctggaggcccggcggtcccacctctcagagagctgcagcatagagtcagacatctacgcagagattcccgacgaaaccctgcgaaggcccggaggtccacagtatggcattgcccgtgaatatgtggtcctgaatcgtattcttggggaaggcttttttggggaggtctatgaaggtgtctacacaaatcacaaaggggagaaaatcaatgtagctgtcaagacctgcaagaaagactgcactctggacaacaaggagaagttcatgagcgaggcagtgatcatgaagaacctcgaccacccgcacatcgtgaagctgatcggcatcattgaagaggagcccacctggatcatcatggaattgtatccctatggggagctgggccactacctggagcggaacaagaactccctgaaggtgctcaccctcgtgctgtactcactgcagatatgcaaagccatggcctacctggagagcatcaactgcgtgcacagggacattgctgtccggaacatcctggtggcctcccctgagtgtgtgaagctgggggactttggtctttcccggtacattgaggacgaggactattacaaagcctctgtgactcgtctccccatcaaatggatgtccccagagtccattaacttccgacgcttcacgacagccagtgacgtctggatgttcgccgtgtgcatgtgggagatcctgagctttgggaagcagcccttcttctggctggagaacaaggatgtcatcggggtgctggagaaaggagaccggctgcccaagcctgatctctgtccaccggtcctttataccctcatgacccgctgctgggactacgaccccagtgaccggccccgcttcaccgagctggtgtgcagcctcagtgacgtttatcagatggagaaggacattgccatggagcaagagaggaatgctcgctaccgaacccccaaaatcttggagcccacagccttccaggaacccccacccaagcccagccgacctaagtacagaccccctccgcaaaccaacctcctggctccaaagctgcagttccaggttcctgagggtctgtgtgccagctctcctacgctcaccagccctatggagtatccatctcccgttaactcactgcacaccccacctctccaccggcacaatgtcttcaaacgccacagcatgcgggaggaggacttcatccaacccagcagccgagaagaggcccagcagctgtgggaggctgaaaaggtcaaaatgcggcaaatcctggacaaacagcagaagcagatggtggaggactaccagtggctcaggcaggaggagaagtccctggaccccatggtttatatgaatgataagtccccattgacgccagagaaggaggtcggctacctggagttcacagggcccccacagaagcccccgaggctgggcgcacagtccatccagcccacagctaacctggaccggactgatgacctggtgtacctcaatgtcatggagctggtgcgggccgtgctggagctcaagaatgagctctgtcagctgccccccgagggctacgtggtggtggtgaagaatgtggggctgaccctgcggaagctcatcgggagcgtggatgatctcctgccttccttgccgtcatcttcacggacagagatcgagggcacccagaaactgctcaacaaagacctggcagagctcatcaacaagatgcggctggcacagcagaacgccgtgacctccctaagtgaggagtgcaagaggcagatgctgacggcttcacacaccctggctgtggacgccaagaacctgctcgacgctgtggaccaggccaaggttctggccaatctggcccacccacctgcagagtga

SEQ ID NO: 480 - DNA, 3030 bp, Homo sapiens
atgtctggggtgtccgagcccctgagtcgagtaaagttgggcacgttacgccggcctgaaggccctgcagagcccatggtggtggtaccagtagatgtggaaaaggaggacgtgcgtatcctcaaggtctgcttctatagcaacagcttcaatcctgggaaaaacttcaaactggtcaaatgcactgtccagacggagatccgggagatcatcacctccatcctgctgagcgggcggatcgggcccaacatccggttggctgagtgctatgggctgaggctgaagcacatgaagtccgatgagatccactggctgcacccacagatgacggtgggtgaggtgcaggacaagtatgagtgtctgcacgtggaagccgagtggaggtatgaccttcaaatccgctacttgccagaagacttcatggagagcctgaaggaggacaggaccacgctgctctatttttaccaacagctccggaacgactacatgcagcgctacgccagcaaggtcagcgagggcatggccctgcagctgggctgcctggagctcaggcggttcttcaaggatatgccccacaatgcacttgacaagaagtccaacttcgagctcctagaaaaggaagtggggctggacttgtttttcccaaagcagatgcaggagaacttaaagcccaaacagttccggaagatgatccagcagaccttccagcagtacgcctcgctcagggaggaggagtgcgtcatgaagttcttcaacactctcgccggcttcgccaacatcgaccaggagacctaccgctgtgaactcattcaaggatggaacattactgtggacctggtcattggccctaaagggatccgccagctgactagtcaggacgcaaagcccacctgcctggccgagttcaagcagatcaggtccatcaggtgcctcccgctggaggagggccaggcagtacttcagctgggcattgaaggtgccccccaggccttgtccatcaaaacctcatccctagcagaggctgagaacatggctgacctcatagacggctactgccggctgcagggtgagcaccaaggctctctcatcatccatcctaggaaagatggtgagaagcggaacagcctgccccagatccccatgctaaacctggaggcccggcggtcccacctctcagagagctgcagcatagagtcagacatctacgcagagattcccgacgaaaccctgcgaaggcccggaggtccacagtatggcattgcccgtgaagatgtggtcctgaatcgtattcttggggaaggcttttttggggaggtctatgaaggtgtctacacaaatcacaaaggggagaaaatcaatgtagctgtcaagacctgcaagaaagactgcactctggacaacaaggagaagttcatgagcgaggcagtgatcatgaagaacctcgaccacccgcacatcgtgaagctgatcggcatcattgaagaggagcccacctggatcatcatggaattgtatccctatggggagctgggccactacctggagcggaacaagaactccctgaaggtgctcaccctcgtgctgtactcactgcagatatgcaaagccatggcctacctggagagcatcaactgcgtgcacagggacattgctgtccggaacatcctggtggcctcccctgagtgtgtgaagctgggggactttggtctttcccggtacattgaggacgaggactattacaaagcctctgtgactcgtctccccatcaaatggatgtccccagagtccattaacttccgacgcttcacgacagccagtgacgtctggatgttcgccgtgtgcatgtgggagatcctgagctttgggaagcagcccttcttctggctggagaacaaggatgtcatcggggtgctggagaaaggagaccggctgcccaagcctgatctctgtccaccggtcctttataccctcatgacccgctgctgggactacgaccccagtgaccggccccgcttcaccgagctggtgtgcagcctcagtgacgtttatcagatggagaaggacattgccatggagcaagagaggaatgctcgctaccgaacccccaaaatcttggagcccacagccttccaggaacccccacccaagcccagccgacctaagtacagaccccctccgcaaaccaacctcctggctccaaagctgcagttccaggttcctgagggtctgtgtgccagctctcctacgctcaccagccctatggagtatccatctcccgttaactcactgcacaccccacctctccaccggcacaatgtcttcaaacgccacagcatgcgggaggaggacttcatccaacccagcagccgagaagaggcccagcagctgtggcaggctgaaaaggtcaaaatgcggcaaatcctggacaaacagcagaagcagatggtggaggactaccagtggctcaggcaggaggagaagtccctggaccccatggtttatatgaatgataagtccccattgacgccagagaaggaggtcggctacctggagttcacagggcccccacagaagcccccgaggctgggcgcacagtccatccagcccacagctaacctggaccggactgatgacctggtgtacctcaatgtcatggagctggtgcgggccgtgctggagctcaagaatgagctctgtcagctgccccccgagggctacgtggtggtggtgaagaatgtggggctgaccctgcggaagctcatcgggagcgtggatgatctcctgccttccttgccgtcatcttcacggacagagatcgagggcacccagaaactgctcaacaaagacctggcagagctcatcaacaagatgcggctggcacagcagaacgccgtgacctccctaagtgaggagtgcaagaggcagatgctgacggcttcacacaccctggctgtggacgccaagaacctgctcgacgctgtggaccaggccaaggttctggccaatctggcccacccacctgcagagtga

SEQ ID NO: 481 - DNA, 3030 bp, Homo sapiens
atgtctggggtgtccgagcccctgagtcgagtaaagttgggcacgttacgccggcctgaaggccctgcagagcccatggtggtggtaccagtagatgtggaaaaggaggacgtgcgtatcctcaaggtctgcttctatagcaacagcttcaatcctgggaaaaacttcaaactggtcaaatgcactgtccagacggagatccgggagatcatcacctccatcctgctgagcgggcggatcgggcccaacatccggttggctgagtgctatgggctgaggctgaagcacatgaagtccgatgagatccactggctgcacccacagatgacggtgggtgaggtgcaggacaagtatgagtgtctgcacgtggaagccgagtggaggtatgaccttcaaatccgctacttgccagaagacttcatggagagcctgaaggaggacaggaccacgctgctctatttttaccaacagctccggaacgactacatgcagcgctacgccagcaaggtcagcgagggcatggccctgcagctgggctgcctggagctcaggcggttcttcaaggatatgccccacaatgcacttgacaagaagtccaacttcgagctcctagaaaaggaagtggggctggacttgtttttcccaaagcagatgcaggagaacttaaagcccaaacagttccggaagatgatccagcagaccttccagcagtacgcctcgctcagggaggaggagtgcgtcatgaagttcttcaacactctcgccggcttcgccaacatcgaccaggagacctaccgctgtgaactcattcaaggatggaacattactgtggacctggtcattggccctaaagggatccgccagctgactagtcaggacgcaaagcccacctgcctggccgagttcaagcagatcaggtccatcaggtgcctcccgctggaggagggccaggcagtacttcagctgggcattgaaggtgccccccaggccttgtccatcaaaacctcatccctagcagaggctgagaacatggctgacctcatagacggctactgccggctgcagggtgagcaccaaggctctctcatcatccatcctaggaaagatggtgagaagcggaacagcctgccccagatccccatgctaaacctggaggcccggcggtcccacctctcagagagctgcagcatagagtcagacatctacgcagagattcccgacgaaaccctgcgaaggcccggaggtccacagtatggcattgcccgtgaagatgtggtcctgaatcgtattcttggggaaggcttttttggggaggtctatgaaggtgtctacacaaatcacaaaggggagaaaatcaatgtagctgtcaagacctgcaagaaagactgcactctggacaacaaggagaagttcatgagcgaggcagtgatcatgaagaacctcgaccacccgcacatcgtgaagctgatcggcatcattgaagaggagcccacctggatcatcatggaattgtatccctatggggagctgggccactacctggagcggaacaagaactccctgaaggtgctcaccctcgtgctgtactcactgcagatatgcaaagccatggcctacctggagagcatcaactgcgtgcacagggacattgctgtccggaacatcctggtggcctcccctgagtgtgtgaagctgggggactttggtctttcccggtacattgaggacgaggactattacaaagcctctgtgactcgtctccccatcaaatggatgtccccagagtccattaacttccgacgcttcacgacagccagtgacgtctggatgttcgccgtgtgcatgtgggagatcctgagctttgggaagcagcccttcttctggctggagaacaaggatgtcatcggggtgctggagaaaggagaccggctgcccaagcctgatctctgtccaccggtcctttataccctcatgacccgctgctgggactacgaccccagtgaccggccccgcttcaccgagctggtgtgcagcctcagtgacgtttatcagatggagaaggacattgccatggagcaagagaggaatgctcgctaccgaacccccaaaatcttggagcccacagccttccaggaacccccacccaagcccagccgacctaagtacagaccccctccgcaaaccaacctcctggctccaaagctgcagttccaggttcctgagggtctgtgtgccagctctcctacgctcaccagccctatggagtatccatctcccgttaactcactgcacaccccacctctccaccggcacaatgtcttcaaacgccacagcatgcgggaggaggacttcatccaacccagcagccgagaagaggcccagcagctgtgggaggctgaaaaggtcaaaatgcggcaaatcctggacaaacagcagaagcagatggtggaggactaccagtggctcaggcaggaggagaagtccctggaccccatggtttatatgaatgataagtccccattgacgccagagaaggaggtcggctacctggagttcacagggcccccacagaagcccccgaggctgggcgcacagtccatccagcccacagctaacctggaccggactgatgacctggtgtacctcaatgtcttggagctggtgcgggccgtgctggagctcaagaatgagctctgtcagctgccccccgagggctacgtggtggtggtgaagaatgtggggctgaccctgcggaagctcatcgggagcgtggatgatctcctgccttccttgccgtcatcttcacggacagagatcgagggcacccagaaactgctcaacaaagacctggcagagctcatcaacaagatgcggctggcacagcagaacgccgtgacctccctaagtgaggagtgcaagaggcagatgctgacggcttcacacaccctggctgtggacgccaagaacctgctcgacgctgtggaccaggccaaggttctggccaatctggcccacccacctgcagagtga

SEQ ID NO: 482 - DNA, 3030 bp, Homo sapiens
atgtctggggtgtccgagcccctgagtcgagtaaagttgggcacgttacgccggcctgaaggccctgcagagcccatggtggtggtaccagtagatgtggaaaaggaggacgtgcgtatcctcaaggtctgcttctatagcaacagcttcaatcctgggaaaaacttcaaactggtcaaatgcactgtccagacggagatccgggagatcatcacctccatcctgctgagcgggcggatcgggcccaacatccggttggctgagtgctatgggctgaggctgaagcacatgaagtccgatgagatccactggctgcacccacagatgacggtgggtgaggtgcaggacaagtatgagtgtctgcacgtggaagccgagtggaggtatgaccttcaaatccgctacttgccagaagacttcatggagagcctgaaggaggacaggaccacgctgctctatttttaccaacagctccggaacgactacatgcagcgctacgccagcaaggtcagcgagggcatggccctgcagctgggctgcctggagctcaggcggttcttcaaggatatgccccacaatgcacttgacaagaagtccaacttcgagctcctagaaaaggaagtggggctggacttgtttttcccaaagcagatgcaggagaacttaaagcccaaacagttccggaagatgatccagcagaccttccagcagtacgcctcgctcagggaggaggagtgcgtcatgaagttcttcaacactctcgccggcttcgccaacatcgaccaggagacctaccgctgtgaactcattcaaggatggaacattactgtggacctggtcattggccctaaagggatccgccagctgactagtcaggacgcaaagcccacctgcctggccgagttcaagcagatcaggtccatcaggtgcctcccgctggaggagggccaggcagtacttcagctgggcattgaaggtgccccccaggccttgtccatcaaaacctcatccctagcagaggctgagaacatggctgacctcatagacggctactgccggctgcagggtgagcaccaaggctctctcatcatccatcctaggaaagatggtgagaagcggaacagcctgccccagatccccatgctaaacctggaggcccggcggtcccacctctcagagagctgcagcatagagtcagacatctacgcagagattcccgacgaaaccctgcgaaggcccggaggtccacagtatggcattgcccgtgaagatgtggtcctgaatcgtattcttggggaaggcttttttggggaggtctatgaaggtgtctacacaaatcacaaaggggagaaaatcaatgtagctgtcaagacctgcaagaaagactgcactctggacaacaaggagaagttcatgagcgaggcagtgatcatgaagaacctcgaccacccgcacatcgtgaagctgatcggcatcattgaagaggagcccacctggatcatcatggaattgtatccctatggggagctgggccactacctggagcggaacaagaactccctgaaggtgctcaccctcgtgctgtactcactgcagatatgcaaagccatggcctacctggagagcatcaactgcgtgcacagggacattgctgtccggaacatcctggtggcctcccctgagtgtgtgaagctgggggactttggtctttcccggtacattgaggacgaggactattacaaagcctctgtgactcgtctccccatcaaatggatgtccccagagtccattaacttccgacgcttcacgacagccagtgacgtctggatgttcgccgtgtgcatgtgggagatcctgagctttgggaagcagcccttcttctggctggagaacaaggatgtcatcggggtgctggagaaaggagaccggctgcccaagcctgatctctgtccaccggtcctttataccctcatgacccgctgctgggactacgaccccagtgaccggccccgcttcaccgagctggtgtgcagcctcagtgacgtttatcagatggagaaggacattgccatggagcaagagaggaatgctcgctaccgaacccccaaaatcttggagcccacagccttccaggaacccccacccaagcccagccgacctaagtacagaccccctccgcaaaccaacctcctggctccaaagctgcagttccaggttcctgagggtctgtgtgccagctctcctacgctcaccagccctatggagtatccatctcccgttaactcactgcacaccccacctctccaccggcacaatgtcttcaaacgccacagcatgcgggaggaggacttcatccaacccagcagccgagaagaggcccagcagctgtgggaggctgaaaaggtcaaaatgcggcaaatcctggacaaacagcagaagcagatggtggaggactaccagtggctcaggcaggaggagaagtccctggaccccatggtttatatgaatgataagtccccattgacgccagagaaggaggtcggctacctggagttcacagggcccccacagaagcccccgaggctgggcgcacagtccatccagcccacagctaacctggaccggactgatgacctggtgtacctcaatgtcatggagctggtgcgggccgtgctggagctcaagaatgagctctgtcagctgccccccgagggctacgtggtggtggtgaagaatgtggggctgaccctgcggaagctcatcgggagcgtggatgatctcctgccttccttgccgtcatcttcacggacagagatcgagggcacccagaaactgctcaacaaagacctggcagagctcatcaacaagatgcggctggcacagcagaacgccgtgacctccctaagtgaggagtgcaagaggcagatgctgatggcttcacacaccctggctgtggacgccaagaacctgctcgacgctgtggaccaggccaaggttctggccaatctggcccacccacctgcagagtga

SEQ ID NO: 483 - DNA, 3345 bp, Homo sapiens
atggcgaaggcgacgtccggtgccgcggggctgcgtctgctgttgctgctgctgctgccgctgctaggcaaagtggcattgggcctctacttctcgagggatgcttactgggagaagctgtatgtggaccaggcggccggcacgcccttgctgtacgtccatgccctgcgggacgcccctgaggaggtgcccagcttccgcctgggccagcatctctacggcacgtaccgcacacggctgcatgagaacaactggatctgcatccaggaggacaccggcctcctctaccttaaccggagcctggaccatagctcctgggagaagctcagtgtccgcaaccgcggctttcccctgctcaccgtctacctcaaggtcttcctgtcacccacatcccttcgtgagggcgagtgccagtggccaggctgtgcccgcgtatacttctccttcttcaacacctcctttccagcctgcagctccctcaagccccgggagctctgcttcccagagacaaggccctccttccgcattcgggagaaccgacccccaggcaccttccaccagttccgcctgctgcctgtgcagttcttgtgccccaacatcagcgtggcctacaggctcctggagggtgagggtctgcccttccgctgcgccccggacagcctggaggtgagcacgcgctgggccctggaccgcgagcagcgggagaagtacgagctggtggccgtgtgcaccgtgcacgccggcgcgcgcgaggaggtggtgatggtgcccttcccggtgaccgtgtacgacgaggacgactcggcgcccaccttccccgcgggcgtcgacaccgccagcgccgtggtggagttcaagcggaaggaggacaccgtggtggccacgctgcgtgtcttcgatgcagacgtggtacctgcatcaggggagctggtgaggcggtacacaagcacgctgctccccggggacacctgggcccagcagaccttccgggtggaacactggcccaacgagacctcggtccaggccaacggcagcttcgtgcgggcgaccgtacatgactataggctggttctcaaccggaacctctccatctcggagaaccgcaccatgcagctggcggtgctggtcaatgactcagacttccagggcccaggagcgggcgtcctcttgctccacttcaacgtgtcggtgctgccggtcagcctgcacctgcccagtacctactccctctccgtgagcaggagggctcgccgatttgcccagatcgggaaagtctgtgtggaaaactgccaggcattcagtggcatcaacgtccagtacaagctgcattcctctggtgccaactgcagcacgctaggggtggtcacctcagccgaggacacctcggggatcctgtttgtgaatgacaccaaggccctgcggcggcccaagtgtgccgaacttcactacatggtggtggccaccgaccagcagacctctaggcaggcccaggcccagctgcttgtaacagtggaggggtcatatgtggccgaggaggcgggctgccccctgtcctgtgcagtcagcaagagacggctggagtgtgaggagtgtggcggcctgggctccccaacaggcaggtgtgagtggaggcaaggagatggcaaagggatcaccaggaacttctccacctgctctcccagcaccaagacctgccccgacggccactgcgatgttgtggagacccaagacatcaacatttgccctcaggactgcctccggggcagcattgttgggggacacgagcctggggagccccgggggattaaagctggctatggcacctgcaactgcttccctgaggaggagaagtgcttctgcgagcccgaagacatccaggatccactgtgcgacgagctgtgccgcacggtgatcgcagccgctgtcctcttctccttcatcgtctcggtgctgctgtctgccttctgcatccactgctaccacaagtttgcccacaagccacccatctcctcagctgagatgaccttccggaggcccgcccaggccttcccggtcagctactcctcttccggtgcccgccggccctcgctggactccatggagaaccaggtctccgtggatgccttcaagatcctggaggatccaaagtgggaattccctcggaagaacttggttcttggaaaaactctaggagaaggcgaatttggaaaagtggtcaaggcaacggccttccatctgaaaggcagaacagggtacaccacggtggccgtgaagatgctgaaagagaacgcctccccgagtgagctgcgagacctgctgtcagagttcaacgtcctgaagcaggtcaaccacccacatgtcatcaaattgtatggggcctgcagccaggatggcccgctcctcctcatcgtggagtacgccaaatacggctccctgcggggcttcctccgcgagagccgcaaagtggggcctggctacctgggcagtggaggcagccgcaactccagctccctggaccacccggatgagcgggccctcaccatgggcgacctcatctcatttgcctggcagatctcacaggggatgcagtatctggccgagatgaagctcgttcatcgggacttggcagccagaaacatcctggtagctgaggggcggaagatgaagatttcggatttcggcttgtcccgagatgtttatgaagaggattcctacgtgaagaggagccagggtcggattccagttaaatggatggcaattgaatccctttttgatcatatctacaccacgcaaagtgatgtatggtcttttggtgtcctgctgtgggagatcgtgaccctagggggaaacccctatcctgggattcctcctgagcggctcttcaaccttctgaagaccggccaccggatggagaggccagacaactgcagcgaggagatgtaccgcctgatgctgcaatgctggaagcaggagccggacaaaaggccggtgtttgcggacatcagcaaagacctggagaagatgatggttaagaggagagactacttggaccttgcggcgtccactccatctgactccctgatttatgacgacggcctctcagaggaggagacaccgctggtggactgtaataatgcccccctccctcgagccctcccttccacatggattgaaaacaaactctatggcatgtcagacccgaactggcctggagagagtcctgtaccactcacgagagctgatggcactaacactgggtttccaagatatccaaatgatagtgtatatgctaactggatgctttcaccctcagcggcaaaattaatggacacgtttgatagttaa

SEQ ID NO: 484 - DNA, 3877 bp, Homo sapiens
atggagctcctcccgccgctgcctcagtccttcctgttgctgctgctgttgcctgccaagcccgcggcgggcgaggactggcagtgcccgcgcaccccctacgcggcctctcgcgactttgacgtgaagtacgtggtgcccagcttctccgccggaggcctggtacaggccatggtgacctacgagggcgacagaaatgagagtgctgtgtttgtagccatacgcaatcgcctgcatgtgcttgggcctgacctgaagtctgtccagagcctggccacgggccctgctggagaccctggctgccagacgtgtgcagcctgtggcccaggaccccacggccctcccggtgacacagacacaaaggtgctggtgctggatcccgcgctgcctgcgctggtcagttgtggctccagcctgcagggccgctgcttcctgcatgacctagagccccaagggacagccgtgcatctggcagcgccagcctgcctcttctcagcccaccataaccggcccgatgactgccccgactgtgtggccagcccattgggcacccgtgtaactgtggttgagcaaggccaggcctcctatttctacgtggcatcctcactggacgcagccgtggctggcagcttcagcccacgctcagtgtctatcaggcgtctcaaggctgacgcctcgggattcgcaccgggctttgtggcgttgtcagtgctgcccaagcatcttgtctcctacagtattgaatacgtgcacagcttccacacgggagccttcgtatacttcctgactgtacagccggccagcgtgacagatgatcctagtgccctgcacacacgcctggcacggcttagcgccactgagccagagttgggtgactatcgggagctggtcctcgactgcagatttgctccaaaacgcaggcgccggggggccccagaaggcggacagccctaccctgtgctgcaggtggcccactccgctccagtgggtgcccaacttgccactgagctgagcatcgccgagggccaggaagtactatttggggtctttgtgactggcaaggatggtggtcctggcgtgggccccaactctgtcgtctgtgccttccccattgacctgctggacacactaattgatgagggtgtggagcgctgttgtgaatccccagtccatccaggcctccggcgaggcctcgacttcttccagtcgcccagtttttgccccaacccgcctggcctggaagccctcagccccaacaccagctgccgccacttccctctgctggtcagtagcagcttctcacgtgtggacctattcaatgggctgttgggaccagtacaggtcactgcattgtatgtgacacgccttgacaacgtcacagtggcacacatgggcacaatggatgggcgtatcctgcaggtggagctggtcaggtcactaaactacttgctgtatgtgtccaacttctcactgggtgacagtgggcagcccgtgcagcgggatgtcagtcgtcttggggaccacctactctttgcctctggggaccaggttttccaggtacctatccgaggccctggctgccgccacttcctgacctgtgggcgttgcctaagggcatggcatttcatgggctgtggctggtgtgggaacatgtgcggccagcagaaggagtgtcctggctcctggcaacaggaccactgcccacctaagcttactgagggagccagtgctgatagcagtgcaacccctctttggcccacgggcaggaggcacctgtctcactcttgaaggccagagtctgtctgtaggcaccagccgggctgtgctggtcaatgggactgagtgtctgctagcacgggtcagtgaggggcagcttttatgtgccacaccccctggggccacggtggccagtgtcccccttagcctgcaggtggggggtgcccaggtacctggttcctggaccttccagtacagagaagaccctgtcgtgctaagcatcagccccaactgtggctacatcaactcccacatcaccatctgtggccagcatctaacttcagcatggcacttagtgctgtcattccatgacgggcttagggcagtggaaagcaggtgtgagaggcagcttccagagcagcagctgtgccgccttcctgaatatgtggtccgagacccccagggatgggtggcagggaatctgagtgcccgaggggatggagctgctggctttacactgcctggctttcgcttcctacccccaccccatccacccagtgccaacctagttccactgaagcctgaggagcatgccattaagtttgagtatattgggctgggcgctgtggctgactgtgtgggtatcaacgtgaccgtgggtggtgagagctgccagcacgagttccggggggacatggttgtctgccccctgcccccatccctgcagcttggccaggatggtgccccattgcaggtctgcgtagatggtgaatgtcatatcctgggtagagtggtgcggccagggccagatggggtcccacagagcacgctccttggtatcctgctgcctttgctgctgcttgtggctgcactggcgactgcactggtcttcagctactggtggcggaggaagcagctagttcttcctcccaacctgaatgacctggcatccctggaccagactgctggagccacacccctgcctattctgtactcgggctctgactacagaagtggccttgcactccctgccattgatggtctggattccaccacttgtgtccatggagcatccttctccgatagtgaagatgaatcctgtgtgccactgctgcggaaagagtccatccagctaagggacctggactctgcgctcttggctgaggtcaaggatgtgctgattccccatgagcgggtggtcacccacagtgaccgagtcattggcaaaggccactttggagttgtctaccacggagaatacatagaccaggcccagaatcgaatccaatgtgccatcaagtcactaagtcgcatcacagagatgcagcaggtggaggccttcctgcgagaggggctgctcatgcgtggcctgaaccacccgaatgtgctggctctcattggtatcatgttgccacctgagggcctgccccatgtgctgctgccctatatgtgccacggtgacctgctccagttcatccgctcacctcagcggaaccccaccgtgaaggacctcatcagctttggcctgcaggtagcccgcggcatggagtacctggcagagcagaagtttgtgcacagggacctggctgcgcggaactgcatgctggacgagtcattcacagtcaaggtggctgactttggtttggcccgcgacatcctggacagggagtactatagtgttcaacagcatcgccacgctcgcctacctgtgaagtggatggcgctggagagcctgcagacctatagatttaccaccaagtctgatgtgtggtcatttggtgtgctgctgtgggaactgctgacacggggtgccccaccataccgccacattgacccttttgaccttacccacttcctggcccagggtcggcgcctgccccagcctgagtattgccctgattctctgtaccaagtgatgcagcaatgctgggaggcagacccagcagtgcgacccaccttcagagtactagtgggggaggtggagcagatagtgtctgcactgcttggggaccattatgtgcagctgccagcaacctacatgaacttgggccccagcacctcgcatgagatgaatgtgcgtccagaacagccgcagttctcacccatgccagggaatgtacgccggccccggccactctcagagcctcctcggcccacttga

SEQ ID NO: 485 - DNA, 4203 bp, Homo sapiens
atggagctcctcccgccgctgcctcagtccttcctgttgctgctgctgttgcctgccaagcccgcggcgggcgaggactggcagtgcccgcgcaccccctacgcggcctctcgcgactttgacgtgaagtacgtggtgcccagcttctccgccggaggcctggtacaggccatggtgacctacgagggcgacagaaatgagagtgctgtgtttgtagccatacgcaatcgcctgcatgtgcttgggcctgacctgaagtctgtccagagcctggccacgggccctgctggagaccctggctgccagacgtgtgcagcctgtggcccaggaccccacggccctcccggtgacacagacacaaaggtgctggtgctggatcccgcgctgcctgcgctggtcagttgtggctccagcctgcagggccgctgcttcctgcatgacctagagccccaagggacagccgtgcatctggcagcgccagcctgcctcttctcagcccaccataaccggcccgatgactgccccgactgtgtggccagcccattgggcacccgtgtaactgtggttgagcaaggccaggcctcctatttctacgtggcatcctcactggacgcagccgtggctggcagcttcagcccacgctcagtgtctatcaggcgtctcaaggctgacgcctcgggattcgcaccgggctttgtggcgttgtcagtgctgcccaagcatcttgtctcctacagtattgaatacgtgcacagcttccacacgggagccttcgtatacttcctgactgtacagccggccagcgtgacagatgatcctagtgccctgcacacacgcctggcacggcttagcgccactgagccagagttgggtgactatcgggagctggtcctcgactgcagatttgctccaaaacgcaggcgccggggggccccagaaggcggacagccctaccctgtgctgcaggtggcccactccgctccagtgggtgcccaacttgccactgagctgagcatcgccgagggccaggaagtactatttggggtctttgtgactggcaaggatggtggtcctggcgtgggccccaactctgtcgtctgtgccttccccattgacctgctggacacactaattgatgagggtgtggagcgctgttgtgaatccccagtccatccaggcctccggcgaggcctcgacttcttccagtcgcccagtttttgccccaacccgcctggcctggaagccctcagccccaacaccagctgccgccacttccctctgctggtcagtagcagcttctcacgtgtggacctattcaatgggctgttgggaccagtacaggtcactgcattgtatgtgacacgccttgacaacgtcacagtggcacacatgggcacaatggatgggcgtatcctgcaggtggagctggtcaggtcactaaactacttgctgtatgtgtccaacttctcactgggtgacagtgggcagcccgtgcagcgggatgtcagtcgtcttggggaccacctactctttgcctctggggaccaggttttccaggtacctatccgaggccctggctgccgccacttcctgacctgtgggcgttgcctaagggcatggcatttcatgggctgtggctggtgtgggaacatgtgcggccagcagaaggagtgtcctggctcctggcaacaggaccactgcccacctaagcttactgagttccacccccacagtggacctctaaggggcagtacaaggctgaccctgtgtggctccaacttctaccttcacccttctggtctggtgcctgagggaacccatcaggtcactgtgggccaaagtccctgccggccactgcccaaggacagctcaaaactcagaccagtgccccggaaagactttgtagaggagtttgagtgtgaactggagcccttgggcacccaggcagtggggcctaccaacgtcagcctcaccgtgactaacatgccaccgggcaagcacttccgggtagacggcacctccgtgctgagaggcttctctttcatggagccagtgctgatagcagtgcaacccctctttggcccacgggcaggaggcacctgtctcactcttgaaggccagagtctgtctgtaggcaccagccgggctgtgctggtcaatgggactgagtgtctgctagcacgggtcagtgaggggcagcttttatgtgccacaccccctggggccacggtggccagtgtcccccttagcctgcaggtggggggtgcccaggtacctggttcctggaccttccagtacagagaagaccctgtcgtgctaagcatcagccccaactgtggctacatcaactcccacatcaccatctgtggccagcatctaacttcagcatggcacttagtgctgtcattccatgacgggcttagggcagtggaaagcaggtgtgagaggcagcttccagagcagcagctgtgccgccttcctgaatatgtggtccgagacccccagggatgggtggcagggaatctgagtgcccgaggggatggagctgctggctttacactgcctggctttcgcttcctacccccaccccatccacccagtgccaacctagttccactgaagcctgaggagcatgccattaagtttgagtatattgggctgggcgctgtggctgactgtgtgggtatcaacgtgaccgtgggtggtgagagctgccagcacgagttccggggggacatggttgtctgccccctgcccccatccctgcagcttggccaggatggtgccccattgcaggtctgcgtagatggtgaatgtcatatcctgggtagagtggtgcggccagggccagatggggtcccacatagcacgctccttggtatcctgctgcctttgctgctgcttgtggctgcactggcgactgcactggtcttcagctactggtggcggaggaagcagctagttcttcctcccaacctgaatgacctggcatccctggaccagactgctggagccacacccctgcctattctgtactcgggctctgactacagaagtggccttgcactccctgccattgatggtctggattccaccacttgtgtccatggagcatccttctccgatagtgaagatgaatcctgtgtgccactgctgcggaaagagtccatccagctaagggacctggactctgcgctcttggctgaggtcaaggatgtgctgattccccatgagcgggtggtcacccacagtgaccgagtcattggcaaaggccactttggagttgtctaccacggagaatacatagaccaggcccagaatcgaatccaatgtgccatcaagtcactaagtcgcatcacagagatgcagcaggtggaggccttcctgcgagaggggctgctcatgcgtggcctgaaccacccgaatgtgctggctctcattggtatcatgttgccacctgagggcctgccccatgtgctgctgccctatatgtgccacggtgacctgctccagttcatccgctcacctcagcggaaccccaccgtgaaggacctcatcagctttggcctgcaggtagcccgcggcatggagtacctggcagagcagaagtttgtgcacagggacctggctgcgcggaactgcatgctggacgagtcattcacagtcaaggtggctgactttggtttggcccgcgacatcctggacagggagtactatagtgttcaacagcatcgccacgctcgcctacctgtgaagtggatggcgctggagagcctgcagacctatagatttaccaccaagtctgatgtgtggtcatttggtgtgctgctgtgggaactgctgacacggggtgccccaccataccgccacattgacccttttgaccttacccacttcctggcccagggtcggcgcctgccccagcctgagtattgccctgattctctgtaccaagtgatgcagcaatgctgggaggcagacccagcagtgcgacccaccttcagagtactagtgggggaggtggagcagatagtgtctgcactgcttggggaccattatgtgcagctgccagcaacctacatgaacttgggccccagcacctcgcatgagatgaatgtgcgtccagaacagccgcagttctcacccatgccagggaatgtacgccggccccggccactctcagagcctcctcggcccacttga

SEQ ID NO: 486 - DNA, 3996 bp, Homo sapiens
atggagctcctcccgccgctgcctcagtccttcctgttgctgctgctgttgcctgccaagcccgcggcgggcgaggactggcagtgcccgcgcaccccctacgcggcctctcgcgactttgacgtgaagtacgtggtgcccagcttctccgccggaggcctggtacaggccatggtgacctacgagggcgacagaaatgagagtgctgtgtttgtagccatacgcaatcgcctgcatgtgcttgggcctgacctgaagtctgtccagagcctggccacgggccctgctggagaccctggctgccagacgtgtgcagcctgtggcccaggaccccacggccctcccggtgacacagacacaaaggtgctggtgctggatcccgcgctgcctgcgctggtcagttgtggctccagcctgcagggccgctgcttcctgcatgacctagagccccaagggacagccgtgcatctggcagcgccagcctgcctcttctcagcccaccataaccggcccgatgactgccccgactgtgtggccagcccattgggcacccgtgtaactgtggttgagcaaggccaggcctcctatttctacgtggcatcctcactggacgcagccgtggctggcagcttcagcccacgctcagtgtctatcaggcgtctcaaggctgacgcctcgggattcgcaccgggctttgtggcgttgtcagtgctgcccaagcatcttgtctcctacagtattgaatacgtgcacagcttccacacgggagccttcgtatacttcctgactgtacagccggccagcgtgacagatgatcctagtgccctgcacacacgcctggcacggcttagcgccactgagccagagttgggtgactatcgggagctggtcctcgactgcagatttgctccaaaacgcaggcgccggggggccccagaaggcggacagccctaccctgtgctgcaggtggcccactccgctccagtgggtgcccaacttgccactgagctgagcatcgccgagggccaggaagtactatttggggtctttgtgactggcaaggatggtggtcctggcgtgggccccaactctgtcgtctgtgccttccccattgacctgctggacacactaattgatgagggtgtggagcgctgttgtgaatccccagtccatccaggcctccggcgaggcctcgacttcttccagtcgcccagtttttgccccaacccgcctggcctggaagccctcagccccaacaccagctgccgccacttccctctgctggtcagtagcagcttctcacgtgtggacctattcaatgggctgttgggaccagtacaggtcactgcattgtatgtgacacgccttgacaacgtcacagtggcacacatgggcacaatggatgggcgtatcctgcaggtggagctggtcaggtcactaaactacttgctgtatgtgtccaacttctcactgggtgacagtgggcagcccgtgcagcgggatgtcagtcgtcttggggaccacctactctttgcctctggggaccaggttttccaggtacctatccgaggccctggctgccgccacttcctgacctgtgggcgttgcctaagggcatggcatttcatgggctgtggctggtgtgggaacatgtgcggccagcagaaggagtgtcctggctcctggcaacaggaccactgcccacctaagcttactgagttccacccccacagtggacctctaaggggcagtacaaggctgaccctgtgtggctccaacttctaccttcacccttctggtctggtgcctgagggaacccatcaggtcactgtgggccaaagtccctgccggccactgcccaaggacagctcaaaactcagaccagtgccccggaaagactttgtagaggagtttgagtgtgaactggagcccttgggcacccaggcagtggggcctaccaacgtcagcctcaccgtgactaacatgccaccgggcaagcacttccgggtagacggcacctccgtgctgagaggcttctctttcatggagccagtgctgatagcagtgcaacccctctttggcccacgggcaggaggcacctgtctcactcttgaaggccagagtctgtctgtaggcaccagccgggctgtgctggtcaatgggactgagtgtctgctagcacgggtcagtgaggggcagcttttatgtgccacaccccctggggccacggtggccagtgtcccccttagcctgcaggtggggggtgcccaggtacctggttcctggaccttccagtacagagaagaccctgtcgtgctaagcatcagccccaactgtggctacatcaactcccacatcaccatctgtggccagcatctaacttcagcatggcacttagtgctgtcattccatgacgggcttagggcagtggaaagcaggtgtgagaggcagcttccagagcagcagctgtgccgccttcctgaatatgtggtccgagacccccagggatgggtggcagggaatctgagtgcccgaggggatggagctgctggctttacactgcctggctttcgcttcctacccccaccccatccacccagtgccaacctagttccactgaagcctgaggagcatgccattaagtttgagtatattgggctgggcgctgtggctgactgtgtgggtatcaacgtgaccgtgggtggtgagagctgccagcacgagttccggggggacatggttgtctgccccctgcccccatccctgcagcttggccaggatggtgccccattgcaggtctgcgtagatggtgaatgtcatatcctgggtagagtggtgcggccagggccagatggggtcccacagagcacgctccttggtatcctgctgcctttgctgctgcttgtggctgcactggcgactgcactggtcttcagctactggtggcggaggaagcagctagttcttcctcccaacctgaatgacctggcatccctggaccagactgctggagccacacccctgcctattctgtactcgggctctgactacagaagtggccttggccactttggagttgtctaccacggagaatacatagaccaggcccagaatcgaatccaatgtgccatcaagtcactaagtcgcatcacagagatgcagcaggtggaggccttcctgcgagaggggctgctcatgcgtggcctgaaccacccgaatgtgctggctctcattggtatcatgttgccacctgagggcctgccccatgtgctgctgccctatatgtgccacggtgacctgctccagttcatccgctcacctcagcggaaccccaccgtgaaggacctcatcagctttggcctgcaggtagcccgcggcatggagtacctggcagagcagaagtttgtgcacagggacctggctgcgcggaactgcatgctggacgagtcattcacagtcaaggtggctgactttggtttggcccgcgacatcctggacagggagtactatagtgttcaacagcatcgccacgctcgcctacctgtgaagtggatggcgctggagagcctgcagacctatagatttaccaccaagtctgatgtgtggtcatttggtgtgctgctgtgggaactgctgacacggggtgccccaccataccgccacattgacccttttgaccttacccacttcctggcccagggtcggcgcctgccccagcctgagtattgccctgattctctgtaccaagtgatgcagcaatgctgggaggcagacccagcagtgcgacccaccttcagagtactagtgggggaggtggagcagatagtgtctgcactgcttggggaccattatgtgcagctgccagcaacctacatgaacttgggccccagcacctcgcatgagatgaatgtgcgtccagaacagccgcagttctcacccatgccagggaatgtacgccggccccggccactctcagagcctcctcggcccacttga

SEQ ID NO: 487 - DNA, 4139 bp, Homo sapiens
atggagctcctcccgccgctgcctcagtccttcctgttgctgctgctgttgcctgccaagcccgcggcgggcgaggactggcagtgcccgcgcaccccctacgcggcctctcgcgactttgacgtgaagtacgtggtgcccagcttctccgccggaggcctggtacaggccatggtgacctacgagggcgacagaaatgagagtgctgtgtttgtagccatacgcaatcgcctgcatgtgcttgggcctgacctgaagtctgtccagagcctggccacgggccctgctggagaccctggctgccagacgtgtgcagcctgtggcccaggaccccacggccctcccggtgacacagacacaaaggtgctggtgctggatcccgcgctgcctgcgctggtcagttgtggctccagcctgcagggccgctgcttcctgcatgacctagagccccaagggacagccgtgcatctggcagcgccagcctgcctcttctcagcccaccataaccggcccgatgactgccccgactgtgtggccagcccattgggcacccgtgtaactgtggttgagcaaggccaggcctcctatttctacgtggcatcctcactggacgcagccgtggctggcagcttcagcccacgctcagtgtctatcaggcgtctcaaggctgacgcctcgggattcgcaccgggctttgtggcgttgtcagtgctgcccaagcatcttgtctcctacagtattgaatacgtgcacagcttccacacgggagccttcgtatacttcctgactgtacagccggccagcgtgacagatgatcctagtgccctgcacacacgcctggcacggcttagcgccactgagccagagttgggtgactatcgggagctggtcctcgactgcagatttgctccaaaacgcaggcgccggggggccccagaaggcggacagccctaccctgtgctgcaggtggcccactccgctccagtgggtgcccaacttgccactgagctgagcatcgccgagggccaggaagtactatttggggtctttgtgactggcaaggatggtggtcctggcgtgggccccaactctgtcgtctgtgccttccccattgacctgctggacacactaattgatgagggtgtggagcgctgttgtgaatccccagtccatccaggcctccggcgaggcctcgacttcttccagtcgcccagtttttgccccaacccgcctggcctggaagccctcagccccaacaccagctgccgccacttccctctgctggtcagtagcagcttctcacgtgtggacctattcaatgggctgttgggaccagtacaggtcactgcattgtatgtgacacgccttgacaacgtcacagtggcacacatgggcacaatggatgggcgtatcctgcaggtggagctggtcaggtcactaaactacttgctgtatgtgtccaacttctcactgggtgacagtgggcagcccgtgcagcgggatgtcagtcgtcttggggaccacctactctttgcctctggggaccaggttttccaggtacctatccgaggccctggctgccgccacttcctgacctgtgggcgttgcctaagggcatggcatttcatgggctgtggctggtgtgggaacatgtgcggccagcagaaggagtgtcctggctcctggcaacaggaccactgcccacctaagcttactgagttccacccccacagtggacctctaaggggcagtacaaggctgaccctgtgtggctccaacttctaccttcacccttctggtctggtgcctgagggaacccatcaggtcactgtgggccaaagtccctgccggccactgcccaaggacagctcaaaactcagaccagtgccccggaaagactttgtagaggagtttgagtgtgaactggagcccttgggcacccaggcagtggggcctaccaacgtcagcctcaccgtgactaacatgccaccgggcaagcacttccgggtagacggcacctccgtgctgagaggcttctctttcatggagccagtgctgatagcagtgcaacccctctttggcccacgggcaggaggcacctgtctcactcttgaaggccagagtctgtctgtaggcaccagccgggctgtgctggtcaatgggactgagtgtctgctagcacgggtcagtgaggggcagcttttatgtgccacaccccctggggccacggtggccagtgtcccccttagcctgcaggtggggggtgcccaggtacctggttcctggaccttccagtacagagaagaccctgtcgtgctaagcatcagccccaactgtggctacatcaactcccacatcaccatctgtggccagcatctaacttcagcatggcacttagtgctgtcattccatgacgggcttagggcagtggaaagcaggtgtgagaggcagcttccagagcagcagctgtgccgccttcctgaatatgtggtccgagacccccagggatgggtggcagggaatctgagtgcccgaggggatggagctgctggctttacactgcctggctttcgcttcctacccccaccccatccacccagtgccaacctagttccactgaagcctgaggagcatgccattaagtttgagtatattgggctgggcgctgtggctgactgtgtgggtatcaacgtgaccgtgggtggtgagagctgccagcacgagttccggggggacatggttgtctgccccctgcccccatccctgcagcttggccaggatggtgccccattgcaggtctgcgtagatggtgaatgtcatatcctgggtagagtggtgcggccagggccagatggggtcccacagagcacgctccttggtatcctgctgcctttgctgctgcttgtggctgcactggcgactgcactggtcttcagctactggtggcggaggaagcagctagttcttcctcccaacctgaatgacctggcatccctggaccagactgctggagccacacccctgcctattctgtactcgggctctgactacagaagtggccttgcactccctgccattgatggtctggattccaccacttgtgtccatggagcatccttctccgatagtgaagatgaatcctgtgtgccactgctgcggaaagagtccatccagctaagggacctggactctgcgctcttggctgaggccactttggagttgtctaccacggagaatacatagaccaggcccagaatcgaatccaatgtgccatcaagtcactaagtcgcatcacagagatgcagcaggtggaggccttcctgcgagaggggctgctcatgcgtggcctgaaccacccgaatgtgctggctctcattggtatcatgttgccacctgagggcctgccccatgtgctgctgccctatatgtgccacggtgacctgctccagttcatccgctcacctcagcggaaccccaccgtgaaggacctcatcagctttggcctgcaggtagcccgcggcatggagtacctggcagagcagaagtttgtgcacagggacctggctgcgcggaactgcatgctggacgagtcattcacagtcaaggtggctgactttggtttggcccgcgacatcctggacagggagtactatagtgttcaacagcatcgccacgctcgcctacctgtgaagtggatggcgctggagagcctgcagacctatagatttaccaccaagtctgatgtgtggtcatttggtgtgctgctgtgggaactgctgacacggggtgccccaccataccgccacattgacccttttgaccttacccacttcctggcccagggtcggcgcctgccccagcctgagtattgccctgattctctgtaccaagtgatgcagcaatgctgggaggcagacccagcagtgcgacccaccttcagagtactagtgggggaggtggagcagatagtgtctgcactgcttggggaccattatgtgcagctgccagcaacctacatgaacttgggccccagcacctcgcatgagatgaatgtgcgtccagaacagccgcagttctcacccatgccagggaatgtacgccggccccggccactctcagagcctcctcggcccacttga

SEQ ID NO: 488 - DNA, 2814 bp, Homo sapiens
atgcaccggccgcgccgccgcgggacgcgcccgccgctcctggcgctgctggccgcgctgctgctggccgcacgcggggctgctgcccaagaaacagagctgtcagtcagtgctgaattagtgcctacctcatcatggaacatctcaagtgaactcaacaaagattcttacctgacccttgatgaaccaatgaataacatcaccacgtctctgggccagacagcagaactgcactgcaaagtctctgggaatccacctcccaccatccgctggttcaaaaatgatgctcctgtggtccaggagccccggaggctctcctttcggtccaccatctatggctctcggctgcggattagaaacctcgacaccacagacacaggctacttccagtgcgtggcaacaaacggcaaggaggtggtttcttccactggagtcttgtttgtcaagtttggcccccctcccactgcaagtccaggatactcagatgagtatgaagaagatggattctgtcagccatacagagggattgcatgtgcaagatttattggcaaccacaccgtctatatggagtctttgcacatgcaaggggaaatagaaaatcagatcacagctgccttcactatgattggcacttccagtcacttatctgataagtgttctcagttcgccattccttccctgtgccactatgccttcccgtactgcgatgaaacttcatccgtcccaaagccccgtgacttgtgtcgcgatgaatgtgaaatcctggagaatgtcctgtgtcaaacagagtacatttttgcaagatcaaatcccatgattctgatgaggctgaaactgccaaactgtgaagatctcccccagccagagagcccagaagctgcgaactgtatccggattggaattcccatggcagatcctataaataaaaatcacaagtgttataacagcacaggtgtggactaccgggggaccgtcagtgtgaccaaatcagggcgccagtgccagccatggaattcccagtatccccacacacacactttcaccgcccttcgtttcccagagctgaatggaggccattcctactgccgcaacccagggaatcaaaaggaagctccctggtgcttcaccttggatgaaaactttaagtctgatctgtgtgacatcccagcttgcgattcaaaggattccaaggagaagaataaaatggaaatcctgtacatactagtgccaagtgtggccattcccctggccattgctttactcttcttcttcatttgcgtctgtcggaataaccagaagtcatcgtcggcaccagtccagaggcaaccaaaacacgtcagaggtcaaaatgtggagatgtcaatgctgaatgcatataaacccaagagcaaggctaaagagctacctctttctgctgtacgctttatggaagaattgggtgagtgtgcctttggaaaaatctataaaggccatctctatctcccaggcatggaccatgctcagctggttgctatcaagaccttgaaagactataacaacccccagcaatggatggaatttcaacaagaagcctccctaatggcagaactgcaccaccccaatattgtctgccttctaggtgccgtcactcaggaacaacctgtgtgcatgctttttgagtatattaatcagggggatctccatgagttcctcatcatgagatccccacactctgatgttggctgcagcagtgatgaagatgggactgtgaaatccagcctggaccacggagattttctgcacattgcaattcagattgcagctggcatggaatacctgtctagtcacttctttgtccacaaggaccttgcagctcgcaatattttaatcggagagcaacttcatgtaaagatttcagacttggggctttccagagaaatttactccgctgattactacagggtccagagtaagtccttgctgcccattcgctggatgccccctgaagccatcatgtatggcaaattctcttctgattcagatatctggtcctttggggttgtcttgtgggagattttcagttttggactccagccatattatggattcagtaaccaggaagtgattgagatggtgagaaaacggcagctcttaccatgctctgaagactgcccacccagaatgtacagcctcatgacagagtgctggaatgagattccttctaggagaccaagatttaaagatattcacgtccggcttcggtcctgggagggactctcaagtcacacaagctctactactccttcagggggaaatgccaccacacagacaacctccctcagtgccagcccagtgagtaatctcagtaaccccagatatcctaattacatgttcccgagccagggtattacaccacagggccagattgctggtttcattggcccgccaatacctcagaaccagcgattcattcccatcaatggatacccaatacctcctggatatgcagcgtttccagctgcccactaccagccaacaggtcctcccagagtgattcagcactgcccacctcccaagagtcggtccccaagcagtgccagtgggtcgactagcactggccatgtgactagcttgccctcatcaggatccaatcaggaagcaaatattcctttactaccacacatgtcaattccaaatcatcctggtggaatgggtatcaccgtttttggcaacaaatctcaaaaaccctacaaaattgactcaaagcaagcatctttactaggagacgccaatattcatggacacaccgaatctatgatttctgcagaactgtaa

SEQ ID NO: 489 - DNA, 2814 bp, Homo sapiens
atgcaccggccgcgccgccgcgggacgcgcccgccgctcctggcgctgctggccgcgctgctgctggccgcacgcggggctgctgcccaagaaacagagctgtcagtcagtgctgaattagtgcctacctcatcatggaacatctcaagtgaactcaacaaagattcttacctgacccttgatgaaccaatgaataacatcaccacgtctctgggccagacagcagaactgcactgcaaagtctctgggaatccacctcccaccatccgctggttcaaaaatgatgctcctgtggtccaggagccccggaggctctcctttcggtccaccatctatggctctcggctgcggattagaaacctcgacaccacagacacaggctacttccagtgcgtggcaacaaacggcaaggaggtggtttcttccactggagtcttgtttgtcaagtttggcccccctcccactgcaagtccaggatactcagatgagtatgaagaagatggattctgtcagccatacagagggattgcatgtgcaagatttattggcaaccgcaccgtctatatggagtctttgcacatgcaaggggaaatagaaaatcagatcacagctgccttcactatgattggcacttccagtcacttatctgataagtgttctcagttcgccattccttccctgtgccactatgccttcccgtactgcgatgaaacttcatccgtcccaaagccccgtgacttgtgtcgcgatgaatgtgaaatcctggagaatgtcctgtgtcaaacagagtacatttttgcaagatcaaatcccatgattctgatgaggctgaaactgccaaactgtgaagatctcccccagccagagagcccagaagctgcgaactgtatccggattggaattcccatggcagatcctataaataaaaatcacaagtgttataacagcacaggtgtggactaccgggggaccgtcagtgtgaccaaatcagggcgccagtgccagccatggaattcccagtatccccacacacacactttcaccgcccttcgtttcccagagctgaatggaggccattcctactgccgcaacccagggaatcaaaaggaagctccctggtgcttcaccttggatgaaaactttaagtctgatctgtgtgacatcccagcttgcgattcaaaggattccaaggagaagaataaaatggaaatcctgtacatactagtgccaagtgtggccattcccctggccattgctttactcttcttcttcatttgcgtctgtcagaataaccagaagtcatcgtcggcaccagtccagaggcaaccaaaacacgtcagaggtcaaaatgtggagatgtcaatgctgaatgcatataaacccaagagcaaggctaaagagctacctctttctgctgtacgctttatggaagaattgggtgagtgtgcctttggaaaaatctataaaggccatctctatctcccaggcatggaccatgctcagctggttgctatcaagaccttgaaagactataacaacccccagcaatggatggaatttcaacaagaagcctccctaatggcagaactgcaccaccccaatattgtctgccttctaggtgccgtcactcaggaacaacctgtgtgcatgctttttgagtatattaatcagggggatctccatgagttcctcatcatgagatccccacactctgatgttggctgcagcagtgatgaagatgggactgtgaaatccagcctggaccacggagattttctgcacattgcaattcagattgcagctggcatggaatacctgtctagtcacttctttgtccacaaggaccttgcagctcgcaatattttaatcggagagcaacttcatgtaaagatttcagacttggggctttccagagaaatttactccgctgattactacagggtccagagtaagtccttgctgcccattcgctggatgccccctgaagccatcatgtatggcaaattctcttctgattcagatatctggtcctttggggttgtcttgtgggagattttcagttttggactccagccatattatggattcagtaaccaggaagtgattgagatggtgagaaaacggcagctcttaccatgctctgaagactgcccacccagaatgtacagcctcatgacagagtgctggaatgagattccttctaggagaccaagatttaaagatattcacgtccggcttcggtcctgggagggactctcaagtcacacaagctctactactccttcagggggaaatgccaccacacagacaacctccctcagtgccagcccagtgagtaatctcagtaaccccagatatcctaattacatgttcccgagccagggtattacaccacagggccagattgctggtttcattggcccgccaatacctcagaaccagcgattcattcccatcaatggatacccaatacctcctggatatgcagcgtttccagctgcccactaccagccaacaggtcctcccagagtgattcagcactgcccacctcccaagagtcggtccccaagcagtgccagtgggtcgactagcactggccatgtgactagcttgccctcatcaggatccaatcaggaagcaaatattcctttactaccacacatgtcaattccaaatcatcctggtggaatgggtatcaccgtttttggcaacaaatctcaaaaaccctacaaaattgactcaaagcaagcatctttactaggagacgccaatattcatggacacaccgaatctatgatttctgcagaactgtaa

SEQ ID NO: 490 - DNA, 2814 bp, Homo sapiens
atgcaccggccgcgccgccgcgggacgcgcccgccgctcctggcgctgctggccgcgctgctgctggccgcacgcggggctgctgcccaagaaacagagctgtcagtcagtgctgaattagtgcctacctcatcatggaacatctcaagtgaactcaacaaagattcttacctgacccttgatgaaccaatgaataacatcaccacgtctctgggccagacagcagaactgcactgcaaagtctctgggaatccacctcccaccatccgctggttcaaaaatgatgctcctgtggtccaggagccccggaggctctcctttcggtccaccatctatggctctcggctgcggattagaaacctcgacaccacagacacaggctacttccagtgcgtggcaacaaacggcaaggaggtggtttcttccactggagtcttgtttgtcaagtttggcccccctcccactgcaagtccaggatactcagatgagtatgaagaagatggattctgtcagccatacagagggattgcatgtgcaagatttattggcaaccgcaccgtctatatggagtctttgcacatgcaaggggaaatagaaaatcagatcacagctgccttcactatgattggcacttccagtcacttatctgataagtgttctcagttcgccattccttccctgtgccactatgccttcccgtactgcgatgaaacttcatccgtcccaaagccccgtgacttgtgtcgcgatgaatgtgaaatcctggagaatgtcctgtgtcaaacagagtacatttttgcaagatcaaatcccatgattctgatgaggctgaaactgccaaactgtgaagatctcccccagccagagagcccagaagctgcgaactgtatccggattggaattcccatggcagatcctataaataaaaatcacaagtgttataacagcacaggtgtggactaccgggggaccgtcagtgtgaccaaatcagggcgccagtgccagccatggaattcccagtatccccacacacacactttcaccgcccttcgtttcccagagctgaatggaggccattcctactgccgcaacccagggaatcaaaaggaagctccctggtgcttcaccttggatgaaaactttaagtctgatctgtgtgacatcccagcttgcgattcaaaggattccaaggagaagaataaaatggaaatcctgtacatactagtgccaagtgtggccattcccctggccattgctttactcttcttcttcatttgcgtctgtcggaataaccagaagtcatcgtcggcaccagtccagaggcaaccaaaacacgtcagaggtcaaaatgtggagatgtcaatgctgaatgcatataaacccaagagcaaggctaaagagctacctctttctgctgtacgctttatggaagaattgggtgagtgtgcctttggaaaaatctataaaggccatctctatctcccaggcatggaccatgctcagctggttgctatcaagaccttgaaagactataacaacccccagcaatggatggaatttcaacaagaagcctccctaatggcagaactgcaccaccccaatattgtctgccttctaggtgccgtcactcaggaacaacctgtgtgcatgctttttgagtatattaatcagggggatctccatgagttcctcatcatgagatccccacactctgatgttggctgcagcagtgatgaagatgggactgtgaaatccagcctggaccacggagattttctgcacattgcaattcagattgcagctggcatggaatacctgtctagtcacttctttgtccacaaggaccttgcagctcgcaatattttaatcggagagcaacttcatgtaaagatttcagacttggggctttccagagaaatttactccgctgattactacagggtccagagtaagtccttgctgcccattcgctggatgccccctgaagccatcatgtatggcaaattctcttctgattcagatatctggtcctttggggttgtcttgtgggagattttcagttttggactccagccatattatggattcagtaaccaggaagtgattgagatggtgagaaaacggcagctcttaccatgctctgaagactgcccacccagaatgtacagcctcatgacagagtgctggaatgagattccttctaggagaccaagatttaaagatattcacgtccggcttcggtcctgggagggactctcaagtcacacaagctctactactccttcagggggaaatgccaccacacagacaacctccctcagtgccagcccagtgagtaatctcagtaaccccagatatcctaattacatgttcccgagccagggtattacaccacagggccagattgctggtttcattggcccgccaatacctcagaaccagcgattcattcccatcaatggatacccaatacctcctggatatgcagcgtttccagctgcccactaccagccaacaggtcctcccagagtgattcagcactgcccacctcccaagagtcggtccccaagcagtgccagtgggtcgactagcactggccatgtgactatcttgccctcatcaggatccaatcaggaagcaaatattcctttactaccacacatgtcaattccaaatcatcctggtggaatgggtatcaccgtttttggcaacaaatctcaaaaaccctacaaaattgactcaaagcaagcatctttactaggagacgccaatattcatggacacaccgaatctatgatttctgcagaactgtaa

SEQ ID NO: 491 - DNA, 2814 bp, Homo sapiens
atgcaccggccgcgccgccgcgggacgcgcccgccgctcctggcgctgctggccgcgctgctgctggccgcacgcggggctgctgcccaagaaacagagctgtcagtcagtgctgaattagtgcctacctcatcatggaacatctcaagtgaactcaacaaagattcttacctgacccttgatgaaccaatgaataacatcaccacgtctctgggccagacagcagaactgcactgcaaagtctctgggaatccacctcccaccatccgctggttcaaaaatgatgctcctgtggtccaggagccccggaggctctcctttcggtccaccatctatggctctcggctgcggattagaaacctcgacaccacagacacaggctacttccagtgcgtggcaacaaacggcaaggaggtggtttcttccactggagtcttgtttgtcaagtttggcccccctcccactgcaagtccaggatactcagatgagtatgaagaagatggattctgtcagccatacagagggattgcatgtgcaagatttattggcaaccgcaccgtctatatggagtctttgcacatgcaaggggaaatagaaaatcagatcacagctgccttcactatgattggcacttccagtcacttatctgataagtgttctcagttcgccattccttccctgtgccactatgccttcccgtactgcgatgaaacttcatccgtcccaaagccccgtgacttgtgtcgcgatgaatgtgaaatcctggagaatgtcctgtgtcaaacagagtacatttttgcaagatcaaatcccatgattctgatgaggctgaaactgccaaactgtgaagatctcccccagccagagagcccagaagctgcgaactgtatccggattggaattcccatggcagatcctataaataaaaatcacaagtgttataacagcacaggtgtggactaccgggggaccgtcagtgtgaccaaatcagggcgccagtgccagccatggaattcccagtatccccacacacacactttcaccgcccttcgtttcccagagctgaatggaggccattcctactgccgcaacccagggaatcaaaaggaagctccctggtgcttcaccttggatgaaaactttaagtctgatctgtgtgacatcccagcttgcgattcaaaggattccaaggagaagaataaaatggaaatcctgtacatactagtgccaagtgtggccattcccctggccattgctttactcttcttcttcatttgcgtctgtcggaataaccagaagtcatcgtcggcaccagtccagaggcaaccaaaacacgtcagaggtcaaaatgtggagatgtcaatgctgaatgcatataaacccaagagcaaggctaaagagctacctctttctgctgtacgctttatggaagaattgggtgagtgtgcctttggaaaaatctataaaggccatctctatctcccaggcatggaccatgctcagctggttgctatcaagaccttgaaagactataacaacccccagcaatggatggaatttcaacaagaagcctccctaatggcagaactgcaccaccccaatattgtctgccttctaggtgccgtcactcaggaacaacctgtgtgcatgctttttgagtatattaatcagggggatctccatgagttcctcatcatgagatccccacactctgatgttggctgcagcagtgatgaagatgggactgtgaaatccagcctggaccacggagattttctgcacattgcaattcagattgcagctggcatggaatacctgtctagtcacttctttgtccacaaggaccttgcagctcgcaatattttaatcggagagcaacttcatgtaaagatttcagacttggggctttccagagaaatttactccgctgattactacagggtccagagtaagtccttgctgcccattcgctggatgccccctgaagccatcatgtatggcaaattctcttctgattcagatatctggtcctttggggttgtcttgtgggagattttcagttttggactccagccatattatggattcagtaaccaggaagtgattgagatggtgagaaaacggcagctcttaccatgctctgaagactgcccacccagaatgtacagcctcatgacagagtgctggaatgagattccttctaggagaccaagatttaaagatattcacgtccggcttcggtcctgggagggactctcaagtcacacaagctctactactccttcagggggaaatgccaccacacagacaacctccctcagtgccagcccagtgagtaatctcagtaaccccagatatcctaattacatgttcccgagccagggtattacaccacagggccagattgctggtttcattggcccgccaatacctcagaaccagcgattcattcccatcaatggatacccaatacctcctggatatgcagcgtttccagctgcccactaccagccaacaggtcctcccagagtgattcagcactgcccacctcccaagagtcggtccccaagcagtgccagtgggtcgactagcactggccatgtgactagcttgccctcatcaggatccaatcaggaagcaaatatttctttactaccacacatgtcaattccaaatcatcctggtggaatgggtatcaccgtttttggcaacaaatctcaaaaaccctacaaaattgactcaaagcaagcatctttactaggagacgccaatattcatggacacaccgaatctatgatttctgcagaactgtaa

SEQ ID NO: 492 - DNA, 2832 bp, Homo sapiens
atggcccggggctcggcgctcccgcggcggccgctgctgtgcatcccggccgtctgggcggccgccgcgcttctgctctcagtgtcccggacttcaggtgaagtggaggttctggatccgaacgaccctttaggaccccttgatgggcaggacggcccgattccaactctgaaaggttactttctgaattttctggagccagtaaacaatatcaccattgtccaaggccagacggcaattctgcactgcaaggtggcaggaaacccaccccctaacgtgcggtggctaaagaatgatgccccggtggtgcaggagccgcggcggatcatcatccggaagacagaatatggttcacgactgcgaatccaggacctggacacgacagacactggctactaccagtgcgtggccaccaacgggatgaagaccattaccgccactggcgtcctgtttgtgcggctgggtccaacgcacagcccaaatcataactttcaggatgattaccacgaggatgggttctgccagccttaccggggaattgcctgtgcacgcttcattggcaaccggaccatttatgtggactcgcttcagatgcagggggagattgaaaaccgaatcacagcggccttcaccatgatcggcacgtctacgcacctgtcggaccagtgctcacagttcgccatcccatccttctgccacttcgtgtttcctctgtgcgacgcgcgctcccggacacccaagccgcgtgagctgtgccgcgacgagtgcgaggtgctggagagcgacctgtgccgccaggagtacaccatcgcccgctccaacccgctcatcctcatgcggcttcagctgcccaagtgtgaggcgctgcccatgcctgagagccccgacgctgccaactgcatgcacattggcatcccagccgagaggctgggccgctaccatcagtgctataacggctcaggcatggattacagaggaacggcaagcaccaccaagtcaggccaccagtgccagccgtgggccctgcagcacccccacagccaccacctgtccagcacagacttccctgagcttggaggggggcacgcctactgccggaaccccggaggccagatggagggcccctggtgctttacgcagaataaaaacgtacgcatggaactgtgtgacgtaccctcgtgtagtccccgagacagcagcaagatggggattctgtacatcttggtccccagcatcgcaattccactggtcatcgcttgccttttcttcttggtttgcatgtgccggaataagcagaaggcatctgcgtccacaccgcagcggcgacagctgatggcctcgcccagccaagacatggaaatgcccctcattaaccagcacaaacaggccaaactcaaagagatcagcctgtctgcggtgaggttcatggaggagctgggagaggaccggtttgggaaagtctacaaaggtcacctgttcggccctgccccgggggagcagacccaggctgtggccatcaaaacgctgaaggacaaagcggaggggcccctgcgggaggagttccggcatgaggctatgctgcgagcacggctgcaacaccccaacgtcgtctgcctgctgggcgtggtgaccaaggaccagcccctgagcatgatcttcagctactgttcgcacggcgacctccacgaattcctggtcatgcgctcgccgcactcggacgtgggcagcaccgatgatgaccgcacggtgaagtccgccctggagccccccgacttcgtgcaccttgtggcacagatcgcggcggggatggagtacctatccagccaccacgtggttcacaaggacctggccacccgcaatgtgctagtgtacgacaagctgaacgtgaagatctcagacttgggcctcttccgagaggtgtatgccgccgattactacaagctgctggggaactcgctgctgcctatccgctggatggccccagaggccatcatgtacggcaagttctccatcgactcagacatctggtcctacggtgtggtcctgtgggaggtcttcagctacggcctgcagccctactgcgggtactccaaccaggatgtggtggagatgatccggaaccggcaggtgctgccttgccccgatgactgtcccgcctgggtgtatgccctcatgatcgagtgctggaacgagttccccagccggcggccccgcttcaaggacatccacagccggctccgagcctggggcaacctttccaactacaacagctcggcgcagacctcgggggccagcaacaccacgcagaccagctccctgagcaccagcccagtgagcaatgtgagcaacgcccgctacgtggggcccaagcagaaggccccgcccttcccacagccccagttcatccccatgaagggccagatcagacccatggtgcccccgccgcagctctacgtccccgtcaacggctaccagccggtgccggcctatggggcctacctgcccaacttctacccggtgcagatcccaatgcagatggccccgcagcaggtgcctcctcagatggtccccaagcccagctcacaccacagtggcagtggctccaccagcacaggctacgtcaccacggccccctccaacacatccatggcagacagggcagccctgctctcagagggcgctgatgacacacagaacgccccagaagatggggcccagagcaccgtgcaggaagcagaggaggaggaggaaggctctgtcccagagactgagctgctgggggactgtgacactctgcaggtggacgaggcccaagtccagctggaagcttga

SEQ ID NO: 493 - DNA, 2832 bp, Homo sapiens
atggcccggggctcggcgctcccgcggcggccgctgctgtgcatcccggccgtctgggcggccgccgcgcttctgctctcagtgtcccggacttcaggtgaagtggaggttctggatccgaacgaccctttaggaccccttgatgggcaggacggcccgattccaactctgaaaggttactttctgaattttctggagccagtaaacaatatcaccattgtccaaggccagacggcaattctgcactgcaaggtggcaggaaacccaccccctaacgtgcggtggctaaagaatgatgccccggtggtgcaggagccgcggcggatcatcatccggaagacagaatatggttcacgactgcgaatccaggacctggacacgacagacactggctactaccagtgcgtggccaccaacgggatgaagaccattaccgccactggcgtcctgtttgtgcggctgggtccaacgcacagcccaaatcataactttcaggatgattaccacgaggatgggttctgccagccttaccggggaattgcctgtgcacgcttcattggcaaccggaccatttatgtggactcgcttcagatgcagggggagattgaaaaccgaatcacagcggccttcaccatgatcggcacgtctacgcacctgtcggaccagtgctcacagttcgccatcccatccttctgccacttcgtgtttcctctgtgcgacgcgcgctcccggacacccaagccgcgtgagctgtgccgcgacgagtgcgaggtgctggagagcgacctgtgccgccaggagtacaccatcgcccgctccaacccgctcatcctcatgcggcttcagctgcccaagtgtgaggcgctgcccatgcctgagagccccgacgctgccaactgcatgcgcattggcatcccagccgagaggctgggccgctaccatcagtgctataacggctcaggcatggattacagaggaacggcaagcaccaccaagtcaggccaccagtgccagccgtgggccctgcagcacccccacagccaccacctgtccagcacagacttccctgagcttggaggggggcacgcctactgccggaaccccggaggccagatggagggcccctggtgctttacgcagaataaaaacgtacgcatggaactgcgtgacgtaccctcgtgtagtccccgagacagcagcaagatggggattctgtacatcttggtccccagcatcgcaattccactggtcatcgcttgccttttcttcttggtttgcatgtgccggaataagcagaaggcatctgcgtccacaccgcagcggcgacagctgatggcctcgcccagccaagacatggaaatgcccctcattaaccagcacaaacaggccaaactcaaagagatcagcctgtctgcggtgaggttcatggaggagctgggagaggaccggtttgggaaagtctacaaaggtcacctgttcggccctgccccgggggagcagacccaggctgtggccatcaaaacgctgaaggacaaagcggaggggcccctgcgggaggagttccggcatgaggctatgctgcgagcacggctgcaacaccccaacgtcgtctgcctgctgggcgtggtgaccaaggaccagcccctgagcatgatcttcagctactgttcgcacggcgacctccacgaattcctggtcatgcgctcgccgcactcggacgtgggcagcaccgatgatgaccgcacggtgaagtccgccctggagccccccgacttcgtgcaccttgtggcacagatcgcggcggggatggagtacctatccagccaccacgtggttcacaaggacctggccacccgcaatgtgctagtgtacgacaagctgaacgtgaagatctcagacttgggcctcttccgagaggtgtatgccgccgattactacaagctgctggggaactcgctgctgcctatccgctggatggccccagaggccatcatgtacggcaagttctccatcgactcagacatctggtcctacggtgtggtcctgtgggaggtcttcagctacggcctgcagccctactgcgggtactccaaccaggatgtggtggagatgatccggaaccggcaggtgctgccttgccccgatgactgtcccgcctgggtgtatgccctcatgatcgagtgctggaacgagttccccagccggcggccccgcttcaaggacatccacagccggctccgagcctggggcaacctttccaactacaacagctcggcgcagacctcgggggccagcaacaccacgcagaccagctccctgagcaccagcccagtgagcaatgtgagcaacgcccgctacgtggggcccaagcagaaggccccgcccttcccacagccccagttcatccccatgaagggccagatcagacccatggtgcccccgccgcagctctacgtccccgtcaacggctaccagccggtgccggcctatggggcctacctgcccaacttctacccggtgcagatcccaatgcagatggccccgcagcaggtgcctcctcagatggtccccaagcccagctcacaccacagtggcagtggctccaccagcacaggctacgtcaccacggccccctccaacacatccatggcagacagggcagccctgctctcagagggcgctgatgacacacagaacgccccagaagatggggcccagagcaccgtgcaggaagcagaggaggaggaggaaggctctgtcccagagactgagctgctgggggactgtgacactctgcaggtggacgaggcccaagtccagctggaagcttga

SEQ ID NO: 494 - DNA, 2798 bp, Homo sapiens
atggcccggggctcggcgctcccgcggcggccgctgctgtgcatcccggccgtctgggcggccgccgcgcttctgctctcagtgtcccggacttcaggtgaagtggaggttctggatccgaacgaccctttaggaccccttgatgggcaggacggcccgattccaactctgaaaggttactttctgaattttctggagccagtaaacaatatcaccattgtccaaggccagacggcaattctgcactgcaaggtggcaggaaacccaccccctaacgtgcggtggctaaagaatgatgccccggtggtgcaggagccgcggcggatcatcatccggaagacagaatatggttcacgactgcgaatccaggacctggacacgacagacactggctactaccagtgcgtggccaccaacgggatgaagaccattaccgccactggcgtcctgtttgtgcggctgggtccaacgcacagcccaaatcataactttcaggatgattaccacgaggatgggttctgccagccttaccggggaattgcctgtgcacgcttcattggcaaccggaccatttatgtggactcgcttcagatgcagggggagattgaaaaccgaatcacagcggccttcaccatgatcggcacgtctacgcacctgtcggaccagtgctcacagttcgccatcccatccttctgccacttcgtgtttcctctgtgcgacgcgcgctcccggacacccaagccgcgtgagctgtgccgcgacgagtgcgaggtgctggagagcgacctgtgccgccaggagtacaccatcgcccgctccaacccgctcatcctcatgcggcttcagctgcccaagtgtgaggcgctgcccatgcctgagagccccgacgctgccaactgcatgcgcattggcatcccagccgagaggctgggccgctaccatcagtgctataacggctcaggcatggattacagaggaacggcaagcaccaccaagtcaggccaccagtgccagccgtgggccctgcagcacccccacagccaccacctgtccagcacagacttccctgagcttggaggggggcacgcctactgccggaaccccggaggccagatggagggcccctggtgctttacgcagaataaaaacgtacgcatggaactgtgtgaatggggattctgtacatcttggtccccagcatcgcaattccactggtcatcgcttgccttttcttcttggtttgcatgtgccggaataagcagaaggcatctgcgtccacaccgcagcggcgacagctgatggcctcgcccagccaagacatggaaatgcccctcattaaccagcacaaacaggccaaactcaaagagatcagcctgtctgcggtgaggttcatggaggagctgggagaggaccggtttgggaaagtctacaaaggtcacctgttcggccctgccccgggggagcagacccaggctgtggccatcaaaacgctgaaggacaaagcggaggggcccctgcgggaggagttccggcatgaggctatgctgcgagcacggctgcaacaccccaacgtcgtctgcctgctgggcgtggtgaccaaggaccagcccctgagcatgatcttcagctactgttcgcacggcgacctccacgaattcctggtcatgcgctcgccgcactcggacgtgggcagcaccgatgatgaccgcacggtgaagtccgccctggagccccccgacttcgtgcaccttgtggcacagatcgcggcggggatggagtacctatccagccaccacgtggttcacaaggacctggccacccgcaatgtgctagtgtacgacaagctgaacgtgaagatctcagacttgggcctcttccgagaggtgtatgccgccgattactacaagctgctggggaactcgctgctgcctatccgctggatggccccagaggccatcatgtacggcaagttctccatcgactcagacatctggtcctacggtgtggtcctgtgggaggtcttcagctacggcctgcagccctactgcgggtactccaaccaggatgtggtggagatgatccggaaccggcaggtgctgccttgccccgatgactgtcccgcctgggtgtatgccctcatgatcgagtgctggaacgagttccccagccggcggccccgcttcaaggacatccacagccggctccgagcctggggcaacctttccaactacaacagctcggcgcagacctcgggggccagcaacaccacgcagaccagctccctgagcaccagcccagtgagcaatgtgagcaacgcccgctacgtggggcccaagcagaaggccccgcccttcccacagccccagttcatccccatgaagggccagatcagacccatggtgcccccgccgcagctctacgtccccgtcaacggctaccagccggtgccggcctatggggcctacctgcccaacttctacccggtgcagatcccaatgcagatggccccgcagcaggtgcctcctcagatggtccccaagcccagctcacaccacagtggcagtggctccaccagcacaggctacgtcaccacggccccctccaacacatccatggcagacagggcagccctgctctcagagggcgctgatgacacacagaacgccccagaagatggggcccagagcaccgtgcaggaagcagaggaggaggaggaaggctctgtcccagagactgagctgctgggggactgtgacactctgcaggtggacgaggcccaagtccagctggaagcttga

SEQ ID NO: 495 - DNA, 2832 bp, Homo sapiens
atggcccggggctcggcgctcccgcggcggccgctgctgtgcatcccggccgtctgggcggccgccgcgcttctgctctcagtgtcccggacttcaggtgaagtggaggttctggatccgaacgaccctttaggaccccttgatgggcaggacggcccgattccaactctgaaaggttactttctgaattttctggagccagtaaacaatatcaccattgtccaaggccagacggcaattctgcactgcaaggtggcaggaaacccaccccctaacgtgcggtggctaaagaatgatgccccggtggtgcaggagccgcggcggatcatcatccggaagacagaatatggttcacgactgcgaatccaggacctggacacgacagacactggctactaccagtgcgtggccaccaacgggatgaagaccattaccgccactggcgtcctgtttgtgcggctgggtccaacgcacagcccaaatcataactttcaggatgattaccacgaggatgggttctgccagccttaccggggaattgcctgtgcacgcttcattggcaaccggaccatttatgtggactcgcttcagatgcagggggagattgaaaaccgaatcacagcggccttcaccatgatcggcacgtctacgcacctgtcggaccagtgctcacagttcgccatcccatccttctgccacttcgtgtttcctctgtgcgacgcgcgctcccggacacccaagccgcgtgagctgtgccgcgacgagtgcgaggtgctggagagcgacctgtgccgccaggagtacaccatcgcccgctccaacccgctcatcctcatgcggcttcagctgcccaagtgtgaggcgctgcccatgcctgagagccccgacgctgccaactgcatgcgcattggcatcccagccgagaggctgggccgctaccatcagtgctataacggctcaggcatggattacagaggaacggcaagcaccaccaagtcaggccaccagtgccagccgtgggccctgcagcacccccacagccaccacctgtccagcacagacttccctgagcttggaggggggcacgcctactgccggaaccccggaggccagatggagggcccctggtgctttacgcagaataaaaacgtacgcatggaactgtgtgacgtaccctcgtgtagtccccgagacagcagcaagatggggattctgtacatcttggtccccagcatcgcaattccactggtcatcgcttgccttttcttcttggtttgcatgtgccggaataagcagaaggcatctgcgtccacaccgcagcggcgacagctgatggcctcgcccagccaagacatggaaatgcccctcattaaccagcacaaacaggccaaactcaaagagatcagcctgtctgcggtgaggttcatggaggagctgggagaggaccggtttgggaaagtctacaaaggtcacctgttcggccctgccccgggggagcagacccaggctgtggccatcaaaacgctgaaggacaaagcggaggggcccctgcgggaggagttccggcatgaggctatgctgcgagcacggctgcaacaccccaacgtcgtctgcctgctgggcgtggtgaccaaggaccagtccctgagcatgatcttcagctactgttcgcacggcgacctccacgaattcctggtcatgcgctcgccgcactcggacgtgggcagcaccgatgatgaccgcacggtgaagtccgccctggagccccccgacttcgtgcaccttgtggcacagatcgcggcggggatggagtacctatccagccaccacgtggttcacaaggacctggccacccgcaatgtgctagtgtacgacaagctgaacgtgaagatctcagacttgggcctcttccgagaggtgtatgccgccgattactacaagctgctggggaactcgctgctgcctatccgctggatggccccagaggccatcatgtacggcaagttctccatcgactcagacatctggtcctacggtgtggtcctgtgggaggtcttcagctacggcctgcagccctactgcgggtactccaaccaggatgtggtggagatgatccggaaccggcaggtgctgccttgccccgatgactgtcccgcctgggtgtatgccctcatgatcgagtgctggaacgagttccccagccggcggccccgcttcaaggacatccacagccggctccgagcctggggcaacctttccaactacaacagctcggcgcagacctcgggggccagcaacaccacgcagaccagctccctgagcaccagcccagtgagcaatgtgagcaacgcccgctacgtggggcccaagcagaaggccccgcccttcccacagccccagttcatccccatgaagggccagatcagacccatggtgcccccgccgcagctctacgtccccgtcaacggctaccagccggtgccggcctatggggcctacctgcccaacttctacccggtgcagatcccaatgcagatggccccgcagcaggtgcctcctcagatggtccccaagcccagctcacaccacagtggcagtggctccaccagcacaggctacgtcaccacggccccctccaacacatccatggcagacagggcagccctgctctcagagggcgctgatgacacacagaacgccccagaagatggggcccagagcaccgtgcaggaagcagaggaggaggaggaaggctctgtcccagagactgagctgctgggggactgtgacactctgcaggtggacgaggcccaagtccagctggaagcttga

SEQ ID NO: 496 - DNA, 7044 bp, Homo sapiens
atgaagaacatttactgtcttattccgaagcttgtcaattttgcaactcttggctgcctatggatttctgtggtgcagtgtacagttttaaatagctgcctaaagtcgtgtgtaactaatctgggccagcagcttgaccttggcacaccacataatctgagtgaaccgtgtatccaaggatgtcacttttggaactctgtagatcagaaaaactgtgctttaaagtgtcgggagtcgtgtgaggttggctgtagcagcgcggaaggtgcatatgaagaggaagtactggaaaatgcagacctaccaactgctccctttgcttcttccattggaagccacaatatgacattacgatggaaatctgcaaacttctctggagtaaaatacatcattcagtggaaatatgcacaacttctgggaagctggacttatactaagactgtgtccagaccgtcctatgtggtcaagcccctgcaccccttcactgagtacattttccgagtggtttggatcttcacagcgcagctgcagctctactcccctccaagtcccagttacatgactcatcctcatggagttcctgaaactgcacctttgattaggaatattgagagctcaagtcccgacactgtggaagtcagctgggatccacctcaattcccaggtggacctattttgggttataacttaaggctgatcagcaaaaatcaaaaattagatgcagggacacagagaaccagtttccagttttactccactttaccaaatactatctacaggttttctattgcagcagtaaatgaagttggtgagggtccagaagcagaatctagtattaccacttcatcttcagcagttcaacaagaggaacagtggctctttttatccagaaaaacttctctaagaaagagatctttaaaacatttagtagatgaagcacattgccttcggttggatgctatataccataatattacaggaatatctgttgatgtccaccagcaaattgtttatttctctgaaggaactctcatatgggcgaagaaggctgccaacatgtctgatgtatctgacctgagaattttttacagaggttcaggattaatttcttctatctccatagattggctttatcaaagaatgtatttcatcatggatgaactggtatgtgtctgtgatttagagaactgctcaaacatcgaggaaattactccaccctctattagtgcacctcaaaaaattgtggctgattcatacaatgggtatgtcttttacctcctgagagatggcatttatagagcagaccttcctgtaccatctggccggtgtgcagaagctgtgcgtattgtggagagttgcacgttaaaggactttgcaatcaagccacaagccaagcgaatcatttacttcaatgacactgcccaagtcttcatgtcaacatttctggatggctctgcttcccatctcatcctacctcgcatcccctttgctgatgtgaaaagttttgcttgtgaaaacaatgactttcttgtcacagatggcaaggtcattttccaacaggatgctttgtcttttaatgaattcatcgtgggatgtgacctgagtcacatagaagaatttgggtttggtaacttggtcatctttggctcatcctcccagctgcaccctctgccaggccgcccgcaggagctttcggtgctgtttggctctcaccaggctcttgttcaatggaagcctcctgcccttgccataggagccaatgtcatcctgatcagtgatattattgaactctttgaattaggcccttctgcctggcagaactggacctatgaggtgaaagtatccacccaagaccctcctgaagtcactcatattttcttgaacataagtggaaccatgctgaatgtacctgagctgcagagtgctatgaaatacaaggtttctgtgagagcaagttctccaaagaggccaggcccctggtcagagccctcagtgggtactaccctggtgccagctagtgaaccaccatttatcatggctgtgaaagaagatgggctttggagtaaaccattaaatagctttggcccaggagagttcttatcctctgatataggaaatgtgtcagacatggattggtataacaacagcctctactacagtgacacgaaaggcgacgtttttgtgtggctgctgaatgggacggatatctcagagaattatcacctacccagcattgcaggagcaggggctttagcttttgagtggctgggtcactttctctactgggctggaaagacatatgtgatacaaaggcagtctgtgttgacgggacacacagacattgttacccacgtgaagctattggtgaatgacatggtggtggattcagttggtggatatctctactggaccacactctattcagtggaaagcaccagactaaatggggaaagttcccttgtactacagacacagccttggttttctgggaaaaaggtaattgctctaactttagacctcagtgatgggctcctgtattggttggttcaagacagtcaatgtattcacctgtacacagctgttcttcggggacagagcactggggataccaccatcacagaatttgcagcctggagtacttctgaaatttcccagaatgcactgatgtactatagtggtcggctgttctggatcaatggctttaggattatcacaactcaagaaataggtcagaaaaccagtgtctctgttttggaaccagccagatttaatcagttcacaattattcagacatcccttaagcccctgccagggaacttttcctttacccctaaggttattccagattctgttcaagagtcttcatttaggattgaaggaaatgcttcaagttttcaaatcctgtggaatggtccccctgcggtagactggggtgtagttttctacagtgtagaatttagtgctcattctaagttcttggctagtgaacaacactctttacctgtatttactgtggaaggactggaaccttatgccttatttaatctttctgtcactccttatacctactggggaaagggccccaaaacatctctgtcacttcgagcacctgaaacagttccatcagcaccagagaaccccagaatatttatattaccaagtggaaaatgctgcaacaagaatgaagttgtggtggaatttaggtggaacaaacctaagcatgaaaatggggtgttaacaaaatttgaaattttctacaatatatccaatcaaagtattacaaacaaaacatgtgaagactggattgctgtcaatgtcactccctcagtgatgtcttttcaacttgaaggcatgagtcccagatgctttattgccttccaggttagggcctttacatctaaggggccaggaccatatgctgacgttgtaaagtctacaacatcagaaatcaacccatttcctcacctcataactcttcttggtaacaagatagtttttttagatatggatcaaaatcaagttgtgtggacgttttcagcagaaagagttatcagtgccgtttgctacacagctgataatgagatgggatattatgctgaaggggactcactctttcttctgcacttgcacaatcgctctagctctgagcttttccaagattcactggtttttgatatcacagttattacaattgactggatttcaaggcacctctactttgcactgaaagaatcacaaaatggaatgcaagtatttgatgttgatcttgaacacaaggtgaaatatcccagagaggtgaagattcacaataggaattcaacaataatttctttttctgtatatcctcttttaagtcgcttgtattggacagaagtttccaattttggctaccagatgttctactacagtattatcagtcacaccttgcaccgaattctgcaacccacagctacaaaccaacaaaacaaaaggaatcaatgttcttgtaatgtgactgaatttgagttaagtggagcaatggctattgatacctctaacctagagaaaccattgatatactttgccaaagcacaagagatctgggcaatggatctggaaggctgtcagtgttggagagttatcacagtacctgctatgctcgcaggaaaaacccttgttagcttaactgtggatggagatcttatatactggatcatcacagcaaaggacagcacacagatttatcaggcaaagaaaggaaatggggccatcgtttcccaggtgaaggccctaaggagtaggcatatcttggcttacagttcagttatgcagccttttccagataaagcgtttctgtctctagcttcagacactgtggaaccaactatacttaatgccactaacactagcctcacaatcagattacctctggccaagacaaacctcacatggtatggcatcaccagccctactccaacatacctggtttattatgcagaagttaatgacaggaaaaacagctctgacttgaaatatagaattctggaatttcaggacagtatagctcttattgaagatttacaaccattttcaacatacatgatacagatagctgtaaaaaattattattcagatcctttggaacatttaccaccaggaaaagagatttggggaaaaactaaaaatggagtaccagaggcagtgcagctcattaatacaactgtgcggtcagacaccagcctcattatatcttggagagaatctcacaagccaaatggacctaaagaatcagtccgttatcagttggcaatctcacacctggccctaattcctgaaactcctctaagacaaagtgaatttccaaatggaaggctcactctccttgttactagactgtctggtggaaatatttatgtgttaaaggttcttgcctgccactctgaggaaatgtggtgtacagagagtcatcctgtcactgtggaaatgtttaacacaccagagaaaccttattccttggttccagagaacactagtttgcaatttaattggaaggctccattgaatgttaacctcatcagattttgggttgagctacagaagtggaaatacaatgagttttaccatgttaaaacttcatgcagccaaggtcctgcttatgtctgtaatatcacaaatctacaaccttatacttcatataatgtcagagtagtggtggtttataagacgggagaaaatagcacctcacttccagaaagctttaagacaaaagctggagtcccaaataaaccaggcattcccaaattactagaagggagtaaaaattcaatacagtgggagaaagctgaagataatggatgtagaattacatactatatccttgagataagaaagagcacttcaaataatttacagaaccagaatttaaggtggaagatgacatttaatggatcctgcagtagtgtttgcacatggaagtccaaaaacctgaaaggaatatttcagttcagagtagtagctgcaaataatctagggtttggtgaatatagtggaatcagtgagaatattatattagttggagatgatttttggataccagaaacaagtttcatacttactattatagttggaatatttctggttgttacaatcccactgacctttgtctggcatagaagattaaagaatcaaaaaagtgccaaggaaggggtgacagtgcttataaacgaagacaaagagttggctgagctgcgaggtctggcagccggagtaggcctggctaatgcctgctatgcaatacatactcttccaacccaagaggagattgaaaatcttcctgccttccctcgggaaaaactgactctgcgtctcttgctgggaagtggagcctttggagaagtgtatgaaggaacagcagtggacatcttaggagttggaagtggagaaatcaaagtagcagtgaagactttgaagaagggttccacagaccaggagaagattgaattcctgaaggaggcacatctgatgagcaaatttaatcatcccaacattctgaagcagcttggagtttgtctgctgaatgaaccccaatacattatcctggaactgatggagggaggagaccttcttacttatttgcgtaaagcccggatggcaacgttttatggtcctttactcaccttggttgaccttgtagacctgtgtgtagatatttcaaaaggctgtgtctacttggaacggatgcatttcattcacagggatctggcagctagaaattgccttgtttccgtgaaagactataccagtccacggatagtgaagattggagactttggactcgccagagacatctataaaaatgattactatagaaagagaggggaaggcctgctcccagttcggtggatggctccagaaagtttgatggatggaatcttcactactcaatctgatgtatggtcttttggaattctgatttgggagattttaactcttggtcatcagccttatccagctcattccaaccttgatgtgttaaactatgtgcaaacaggagggagactggagccaccaagaaattgtcctgatgatctgtggaatttaatgacccagtgctgggctcaagaacccgaccaaagacctacttttcatagaattcaggaccaacttcagttattcagaaattttttcttaaatagcatttataagtccagagatgaagcaaacaacagtggagtcataaatgaaagctttgaaggtgaagatggcgatgtgatttgtttgaattcagatgacattatgccagttgctttaatggaaacgaagaaccgagaagggttaaactatatggtacttgctacagaatgtggccaaggtgaagaaaagtctgagggtcctctaggctcccaggaatctgaatcttgtggtctgaggaaagaagagaaggaaccacatgcagacaaagatttctgccaagaaaaacaagtggcttactgcccttctggcaagcctgaaggcctgaactatgcctgtctcactcacagtggatatggagatgggtctgattaa

SEQ ID NO: 497 - DNA, 2365 bp, Homo sapiens
caagctttcaagcattcaaaggtctaaatgaaaaaggctaagtattatttcaaaaggcaagtatatcctaatatagcaaaacaaacaaagcaaaatccatcagctactcctccaattgaagtgatgaagcccaaataattcatatagcaaaatggagaaaattagaccggccatctaaaaatctgccattggtgaagtgatgaagaacatttactgtcttattccgaagcttgtcaattttgcaactcttggctgcctatggatttctgtggtgcagtgtacagttttaaatagctgcctaaagtcgtgtgtaactaatctgggccagcagcttgaccttggcacaccacataatctgagtgaaccgtgtatccaaggatgtcacttttggaactctgtagatcagaaaaactgtgctttaaagtgtcgggagtcgtgtgaggttggctgtagcagcgcggaaggtgcatatgaagaggaagtactggaaaatgcagacctaccaactgctccctttgcttcttccattggaagccacaatatgacattacgatggaaatctgcaaacttctctggagtaaaatacatcattcagtggaaatatgcacaacttctgggaagctggacttatactaagactgtgtccagaccgtcctatgtggtcaagcccctgcaccccttcactgagtacattttccgagtggtttggatcttcacagcgcagctgcagctctactcccctccaagtcccagttacaggactcatcctcatggagttcctgaaactgcacctttgattaggaatattgagagctcaagtcccgacactgtggaagtcagctgggatccacctcaattcccaggtggacctattttgggttataacttaaggctgatcagcaaaaatcaaaaattagatgcagggacacagagaaccagtttccagttttactccactttaccaaatactatctacaggttttctattgcagcagtaaatgaagttggtgagggtccagaagcagaatctagtattaccacttcatcttcagcagttcaacaagaggaacagtggctctttttatccagaaaaacttctctaagaaagagatctttaaaacatttagtagatgaagcacattgccttcggttggatgctatataccataatattacaggaatatctgttgatgtccaccagcaaattgtttatttctctgaaggaactctcatatgggcgaagaaggctgccaacatgtctgatgtatctgacctgagaattttttacagaggttcaggattaatttcttctatctccatagattggctttatcaaagaatgtatttcatcatggatgaactggtatgtgtctgtgatttagagaactgctcaaacatcgaggaaattactccaccctctattagtgcacctcaaaaaattgtggctgattcatacaatgggtatgtcttttacctcctgagagatggcatttatagagcagaccttcctgtaccatctggccggtgtgcagaagctgtgcgtattgtggagagttgcacgttaaaggactttgcaatcaagccacaagccaagcgaatcatttacttcaatgacactgcccaagtcttcatgtcaacatttctggatggctctgcttcccatctcatcctacctcgcatcccctttgctgatgtgaaaagttttgcttgtgaaaacaatgactttcttgtcacagatggcaaggtcattttccaacaggatgctttgtcttttaatgaattcatcgtgggatgtgacctgagtcacatagaagaatttgggtttggtaacttggtcatctttggctcatcctcccagctgcaccctctgccaggccgcccgcaggagctttcggtgctgtttggctctcaccaggctcttgttcaatggaagcctcctgcccttgccataggagccaatgtcatcctgatcagtgatattattgaactctttgaattaggcccttctgcctggcagaactggacctatgaggtgaaagtatccacccaagaccctcctgaagtcactcatattttcttgaacataagtggaaccatgctgaatgtacctgagctgcagagtgctatgaaatacaaggtttctgtgagagcaagttctccaaagaggccaggcccctggtcagagccctcagtgggtactaccctggtgccagctagtgaaccaccatttatcatggctgtgaaagaagatgggctttggagtaaaccattaaatagctttggcccaggagagttcttatcctctgatataggaaatgtgtcagcctctactacagtgacacgaaaggcgacgtttttgcagtga

SEQ ID NO: 498 - DNA, 2859 bp, Homo sapiens
atgaagaacatttactgtcttattccgaagcttgtcaattttgcaactcttggctgcctatggatttctgtggtgcagtgtacagttttaaatagctgcctaaagtcgtgtgtaactaatctgggccagcagcttgaccttggcacaccacataatctgagtgaaccgtgtatccaaggatgtcacttttggaactctgtagatcagaaaaactgtgctttaaagtgtcgggagtcgtgtgaggttggctgtagcagcgcggaaggtgcatatgaagaggaagtactggaaaatgcagacctaccaactgctccctttgcttcttccattggaagccacaatatgacattacgatggaaatctgcaaacttctctggagtaaaatacatcattcagtggaaatatgcacaacttctgggaagctggacttatactaagactgtgtccagaccgtcctatgtggtcaagcccctgcaccccttcactgagtacattttccgagtggtttggatcttcacagcgcagctgcagctctactcccctccaagtcccagttacaggactcatcctcatggagttcctgaaactgcacctttgattaggaatattgagagctcaagtcccgacactgtggaagtcagctgggatccacctcaattcccaggtggacctattttgggttataacttaaggctgatcagcaaaaatcaaaaattagatgcagggacacagagaaccagtttccagttttactccactttaccaaatactatctacaggttttctattgcagcagtaaatgaagttggtgagggtccagaagcagaatctagtattaccacttcatcttcagcagttcaacaagaggaacagtggctctttttatccagaaaaacttctctaagaaagagatctttaaaacatttagtagatgaagcacattgccttcggttggatgctatataccataatattacaggaatatctgttgatgtccaccagcaaattgtttatttctctgaaggaactctcatatgggcgaagaaggctgccaacatgtctgatgtatctgacctgagaattttttacagaggttcaggattaatttcttctatctccatagattggctttatcaaagaatgtatttcatcatggatgaactggtatgtgtctgtgatttagagaactgctcaaacatcgaggaaattactccaccctctattagtgcacctcaaaaaattgtggctgattcatacaatgggtatgtcttttacctcctgagagatggcatttatagagcagaccttcctgtaccatctggccggtgtgcagaagctgtgcgtattgtggagagttgcacgttaaaggactttgcaatcaagccacaagccaagcgaatcatttacttcaatgacactgcccaagtcttcatgtcaacatttctggatggctctgcttcccatctcatcctacctcgcatcccctttgctgatgtgaaaagttttgcttgtgaaaacaatgactttcttgtcacagatggcaaggtcattttccaacaggatgctttgtcttttaatgaattcatcgtgggatgtgacctgagtcacatagaagaatttgggtttggtaacttggtcatctttggctcatcctcccagctgcaccctctgccaggccgcccgcaggagctttcggtgctgtttggctctcaccaggctcttgttcaatggaagcctcctgcccttgccataggagccaatgtcatcctgatcagtgatattattgaactctttgaattaggcccttctgcctggcagaactggacctatgaggtgaaagtatccacccaagaccctcctgaagtcactcatattttcttgaacataagtggaaccatgctgaatgtacctgagctgcagagtgctatgaaatacaaggtttctgtgagagcaagttctccaaagaggccaggcccctggtcagagccctcagtgggtactaccctggtgccagctagtgaaccaccatttatcatggctgtgaaagaagatgggctttggagtaaaccattaaatagctttggcccaggagagttcttatcctctgatataggaaatgtgtcagacatggattggtataacaacagcctctactacagtgacacgaaaggcgacgtttttgtgtggctgctgaatgggacggatatctcagagaattatcacctacccagcattgcaggagcaggggctttagcttttgagtggctgggtcactttctctactgggctggaaagacatatgtgatacaaaggcagtctgtgttgacgggacacacagacattgttacccacgtgaagctattggtgaatgacatggtggtggattcagttggtggatatctctactggaccacactctattcagtggaaagcaccagactaaatggggaaagttcccttgtactacagacacagccttggttttctgggaaaaaggtaattgctctaactttagacctcagtgatgggctcctgtattggttggttcaagacagtcaatgtattcacctgtacacagctgttcttcggggactaagttcttggctagtgaacaacactctttacctgtatttactgtggaaggactggaaccttatgccttatttaatctttctgtcactccttatacctactggggaaagggccccaaaacatctctgtcacttcgagcacctgaaacagttccatcagcaccagagaaccccagaatatttatattaccaagtggaaaatgctgcaacaagaatgaagttgtggtggaatttaggtggaacaaacctaagcatgaaaatggggtgt

SEQ ID NO: 499 - DNA, 7044 bp, Homo sapiens
atgaagaacatttactgtcttattccgaagcttgtcaattttgcaactcttggctgcctatggatttctgtggtgcagtgtacagttttaaatagctgcctaaagtcgtgtgtaactaatctgggccagcagcttgaccttggcacaccacataatctgagtgaaccgtgtatccaaggatgtcacttttggaactctgtagatcagaaaaactgtgctttaaagtgtcgggagtcgtgtgaggttggctgtagcagcgcggaaggtgcatatgaagaggaagtactggaaaatgcagacctaccaactgctccctttgcttcttccattggaagccacaatatgacattacgatggaaatctgcaaacttctctggagtaaaatacatcattcagtggaaatatgcacaacttctgggaagctggacttatactaagactgtgtccagaccgtcctatgtggtcaagcccctgcaccccttcactgagtacattttccgagtggtttggatcttcacagcgcagctgcagctctactcccctccaagtcccagttacaggactcatcctcatggagttcctgaaactgcacctttgattaggaatattgagagctcaagtcccgacactgtggaagtcagctgggatccacctcaattcccaggtggacctattttgggttataacttaaggctgatcagcaaaaatcaaaaattagatgcagggacacagagaaccagtttccagttttactccactttaccaaatactatctacaggttttctattgcagcagtaaatgaagttggtgagggtccagaagcagaatctagtattaccacttcatcttcagcagttcaacaagaggaacagtggctctttttatccagaaaaacttctctaagaaagagatctttaaaacatttagtagatgaagcacattgccttcggttggatgctatataccataatattacaggaatatctgttgatgtccaccagcaaattgtttatttctctgaaggaactctcatatgggcgaagaaggctgccaacatgtctgatgtatctgacctgagaattttttacagaggttcaggattaatttcttctatctccatagattggctttatcaaagaatgtatttcatcatggatgaactggtatgtgtctgtgatttagagaactgctcaaacatcgaggaaattactccaccctctattagtgcacctcaaaaaattgtggctgattcatacaatgggtatgtcttttacctcctgagagatggcatttatagagcagaccttcctgtaccatctggccggtgtgcagaagctgtgcgtattgtggagagttgcacgttaaaggactttgcaatcaagccacaagccaagcgaatcatttacttcaatgacactgcccaagtcttcatgtcaacatttctggatggctctgcttcccatctcatcctacctcgcatcccctttgctgatgtgaaaagttttgcttgtgaaaacaatgactttcttgtcacagatggcaaggtcattttccaacaggatgctttgtcttttaatgaattcatcgtgggatgtgacctgagtcacatagaagaatttgggtttggtaacttggtcatctttggctcatcctcccagctgcaccctctgccaggccgcccgcaggagctttcggtgctgtttggctctcaccaggctcttgttcaatggaagcctcctgcccttgccataggagccaatgtcatcctgatcagtgatattattgaactctttgaattaggcccttctgcctggcagaactggacctatgaggtgaaagtatccacccaagaccctcctgaagtcactcatattttcttgaacataagtggaaccatgctgaatgtacctgagctgcagagtgctatgaaatacaaggtttctgtgagagcaagttctccaaagaggccaggcccctggtcagagccctcagtgggtactaccctggtgccagctagtgaaccaccatttatcatggctgtgaaagaagatgggctttggagtaaaccattaaatagctttggcccaggagagttcttatcctctgatataggaaatgtgtcagacatggattggtataacaacagcctctactacagtgacacgaaaggcgacgtttttgtgtggctgctgaatgggacggatatctcagagaattatcacctacccagcattgcaggagcaggggctttagcttttgagtggctgggtcactttctctactgggctggaaagacatatgtgatacaaaggcagtctgtgttgacgggacacacagacattgttacccacgtgaagctattggtgaatgacatggtggtggattcagttggtggatatctctactggaccacactctattcagtggaaagcaccagactaaatggggaaagttcccttgtactacagacacagccttggttttctgggaaaaaggtaattgctctaactttagacctcagtgatgggctcctgtattggttggttcaagacagtcaatgtattcacctgtacacagctgttcttcggggacagagcactggggataccaccatcacagaatttgcagcctggagtacttctgaaatttcccagaatgcactgatgtactatagtggtcggctgttctggatcaatggctttaggattatcacaactcaagaaataggtcagaaaaccagtgtctctgttttggaaccagccagatttaatcagttcacaattattcagacatcccttaagcccctgccagggaacttttcctttacccctaaggttattccagattctgttcaagagtcttcatttaggattgaaggaaatgcttcaagttttcaaatcctgtggaatggtccccctgcggtagactggggtgtagttttctacagtgtagaatttagtgctcattctaagttcttggctagtgaacaacactctttacctgtatttactgtggaaggactggaaccttatgccttatttaatctttctgtcactccttatacctactggggaaagggccccaaaacatctctgtcacttcgagcacctgaaacagttccatcagcaccagagaaccccagaatatttatattaccaagtggaaaatgctgcaacaagaatgaagttgtggtggaatttaggtggaacaaacctaagcatgaaaatggggtgttaacaaaatttgaaattttctacaatatatccaatcaaagtattacaaacaaaacatgtgaagactggattgctgtcaatgtcactccctcagtgatgtcttttcaacttgaaggcatgagtcccagatgctttattgccttccaggttagggcctttacatctaaggggccaggaccatatgctgacgttgtaaagtctacaacatcagaaatcaacccatttcctcacctcataactcttcttggtaacaagatagtttttttagatatggatcaaaatcaagttgtgtggacgttttcagcagaaagagttatcagtgccgtttgctacacagctgataatgagatgggatattatgctgaaggggactcactctttcttctgcacttgcacaatcgctctagctctgagcttttccaagattcactggtttttgatatcacagttattacaattgactggatttcaaggcacctctactttgcactgaaagaatcacaaaatggaatgcaagtatttgatgttgatcttgaacacaaggtgaaatatcccagagaggtgaagattcacaataggaattcaacaataatttctttttctgtatatcctcttttaagtcgcttgtattggacagaagtttccaattttggctaccagatgttctactacagtattatcagtcacaccttgcaccgaattctgcaacccacagctacaaaccaacaaaacaaaaggaatcaatgttcttgtaatgtgactgaatttgagttaagtggagcaatggctattgatacctctaacctagagaaaccattgatatactttgccaaagcacaagagatctgggcaatggatctggaaggctgtcagtgttggagagttatcacagtacctgctatgctcgcaggaaaaacccttgttagcttaactgtggatggagatcttatatactggatcatcacagcaaaggacagcacacagatttatcaggcaaagaaaggaaatggggccatcgtttcccaggtgaaggccctaaggagtaggcatatcttggcttacagttcagttatgcagccttttccagataaatcgtttctgtctctagcttcagacactgtggaaccaactatacttaatgccactaacactagcctcacaatcagattacctctggccaagacaaacctcacatggtatggcatcaccagccctactccaacatacctggtttattatgcagaagttaatgacaggaaaaacagctctgacttgaaatatagaattctggaatttcaggacagtatagctcttattgaagatttacaaccattttcaacatacatgatacagatagctgtaaaaaattattattcagatcctttggaacatttaccaccaggaaaagagatttggggaaaaactaaaaatggagtaccagaggcagtgcagctcattaatacaactgtgcggtcagacaccagcctcattatatcttggagagaatctcacaagccaaatggacctaaagaatcagtccgttatcagttggcaatctcacacctggccctaattcctgaaactcctctaagacaaagtgaatttccaaatggaaggctcactctccttgttactagactgtctggtggaaatatttatgtgttaaaggttcttgcctgccactctgaggaaatgtggtgtacagagagtcatcctgtcactgtggaaatgtttaacacaccagagaaaccttattccttggttccagagaacactagtttgcaatttaattggaaggctccattgaatgttaacctcatcagattttgggttgagctacagaagtggaaatacaatgagttttaccatgttaaaacttcatgcagccaaggtcctgcttatgtctgtaatatcacaaatctacaaccttatacttcatataatgtcagagtagtggtggtttataagacgggagaaaatagcacctcacttccagaaagctttaagacaaaagctggagtcccaaataaaccaggcattcccaaattactagaagggagtaaaaattcaatacagtgggagaaagctgaagataatggatgtagaattacatactatatccttgagataagaaagagcacttcaaataatttacagaaccagaatttaaggtggaagatgacatttaatggatcctgcagtagtgtttgcacatggaagtccaaaaacctgaaaggaatatttcagttcagagtagtagctgcaaataatctagggtttggtgaatatagtggaatcagtgagaatattatattagttggagatgatttttggataccagaaacaagtttcatacttactattatagttggaatatttctggttgttacaatcccactgacctttgtctggcatagaagattaaagaatcaaaaaagtgccaaggaaggggtgacagtgcttataaacgaagacaaagagttggctgagctgcgaggtctggcagccggagtaggcctggctaatgcctgctatgcaatacatactcttccaacccaagaggagattgaaaatcttcctgccttccctcgggaaaaactgactctgcgtctcttgctgggaagtggagcctttggagaagtgtatgaaggaacagcagtggacatcttaggagttggaagtggagaaatcaaagtagcagtgaagactttgaagaagggttccacagaccaggagaagattgaattcctgaaggaggcacatctgatgagcaaatttaatcatcccaacattctgaagcagcttggagtttgtctgctgaatgaaccccaatacattatcctggaactgatggagggaggagaccttcttacttatttgcgtaaagcccggatggcaacgttttatggtcctttactcaccttggttgaccttgtagacctgtgtgtagatatttcaaaaggctgtgtctacttggaacggatgcatttcattcacagggatctggcagctagaaattgccttgtttccgtgaaagactataccagtccacggatagtgaagattggagactttggactcgccagagacatctataaaaatgattactatagaaagagaggggaaggcctgctcccagttcggtggatggctccagaaagtttgatggatggaatcttcactactcaatctgatgtatggtcttttggaattctgatttgggagattttaactcttggtcatcagccttatccagctcattccaaccttgatgtgttaaactatgtgcaaacaggagggagactggagccaccaagaaattgtcctgatgatctgtggaatttaatgacccagtgctgggctcaagaacccgaccaaagacctacttttcatagaattcaggaccaacttcagttattcagaaattttttcttaaatagcatttataagtccagagatgaagcaaacaacagtggagtcataaatgaaagctttgaaggtgaagatggcgatgtgatttgtttgaattcagatgacattatgccagttgctttaatggaaacgaagaaccgagaagggttaaactatatggtacttgctacagaatgtggccaaggtgaagaaaagtctgagggtcctctaggctcccaggaatctgaatcttgtggtctgaggaaagaagagaaggaaccacatgcagacaaagatttctgccaagaaaaacaagtggcttactgcccttctggcaagcctgaaggcctgaactatgcctgtctcactcacagtggatatggagatgggtctgattaa

SEQ ID NO: 500 - DNA, 1815 bp, Homo sapiens
atgcgtggggcggcgcggctggggcggccgggccggagttgcctcccggggcccgcgctgagggccgccgccgcgcccgccctgctgcttgctcgttgcgctgttgccgctgctgccggcctgcgtgccgccgcccgtccgcggcccccggagctgcagtcggcttccgcggggcccagcgtgagtctctacctgagcgaggacgaggtgcgccggctgatcggtcttgatgcagaactttattatgtgagaaatgaccttattagtcactacgctctatcctttaatctgttagtacccagtgagacaaatttcctgcacttcacctggcatgcgaagtccaaggttgaatataagctgggattccaagtggacaatgttttggcaatggatatgccccaggtcaacatttctgttcagggggaagttccacgcactttatcagtgtttcgggtagagctttcctgtactggcaaagtagattctgaagttatgatactaatgcagctcaacttgacagtaaattcttcaaaaaattttaccgtcttaaattttaaacgaaggaaaatgtgctacaaaaaacttgaagaagtaaaaacttcagccttggacaaaaacactagcagaactatttatgatcctgtacatgcagctccaaccacttctacgcgtgtgttttatattagtgtaggggtttgttgtgcagtaatatttctcgtagcaataatattagctgttttgcaccttcgtaatatgaaaaggattgaactggatgacagcattagtgccagcagtagttcccaagggctgtctcagccatccacccagacgactcagtatctgagagcagacacgcccaacaatgcaactcctatcaccagttatcctaccttgcggatagagaagaacgacttgagaagtgtcactcttttggaggccaaaggcaaggtgaaggatatagcaatatccagagagaggataactctaaaagatgtactccaagaaggtacttttgggcgtattttccatgggattttaatagatgaaaaagatccaaataaagaaaaacaagcatttgtcaaaacagttaaagatcaagcttctgaaattcaggtgacaatgatgctcactgaaagttgtaagctgcgaggtcttcatcacagaaatcttcttcctattactcatgtgtgtatagaagaaggagaaaagcccatggtgatattgccttacatgaattgggggaatcttaaattgtttttacgacagtgcaagttagtagaggccaataatccacaggcaatttctcagcaagacctggtacacatggctattcagattgcctgtggaatgagctacctggccagaagggaagtcatccacaaagacctggctgccaggaactgtgtcattgatgacacacttcaagttaagatcacagacaatgccctctccagagacttgttccccatggactatcactgtctgggggacaatgaaaacaggccagttcgttggatggctcttgaaagtctggttaataacgagttctctagcgctagtgatgtgtgggcctttggagtgacgctgtgggaactcatgactctgggccagactccctacgtggacattgaccccttcgagatggccgcatacctgaaagatggttaccgaatagcccagccaatcaactgtcctgatgaattatttgctgtgatggcctgttgctgggccttagatccagaggagaggcccaagtttcagcagctggtacagtgcctaacagagtttcatgcagccctgggggcctacgtctga

SEQ ID NO: 501 - DNA, 1815 bp, Homo sapiens
atgcgtggggcggcgcggctggggcggccgggccggagttgcctcccggggcccgcgctgagggccgccgccgcgcccgccctgctgcttgctcgttgcgctgttgccgctgctgccggcctgcgtgccgccgcccgtccgcggcccccggagctgcagtcggcttccgcggggcccagcgtgagtctctacctgagcgaggacgaggtgcgccggctgatcggtcttgatgcagaactttattatgtgagaaatgaccttattagtcactacgctctatcctttaatctgttagtacccagtgagacaaatttcctgcacttcacctggcatgcgaagtccaaggttgaatataagctgggattccaagtggacaatgttttggcaatggatatgccccaggtcaacatttctgttcagggggaagttccacgcactttatcagtgtttcgggtagagctttcctgtactggcaaagtagattctgaagttatgatactaatgcagctcaacttgacagtaaattcttcaaaaaattttaccgtcttaaattttaaacgaaggaaaatgtgctacaaaaaacttgaagaagtaaaaacttcagccttggacaaaaacactagcagaactatttatgatcctgtacatgcagctccaaccacttctacgcgtgtgttttatattagtgtaggggtttgttgtgcagtaatatttctcgtagcaataatattagctgttttgcaccttcataatatgaaaaggattgaactggatgacagcattagtgccagcagtagttcccaagggctgtctcagccatccacccagacgactcagtatctgagagcagacacgcccaacaatgcaactcctatcaccagttatcctaccttgcggatagagaagaacgacttgagaagtgtcactcttttggaggccaaaggcaaggtgaaggatatagcaatatccagagagaggataactctaaaagatgtactccaagaaggtacttttgggcgtattttccatgggattttaatagatgaaaaagatccaaataaagaaaaacaagcatttgtcaaaacagttaaagatcaagcttctgaaattcaggtgacaatgatgctcactgaaagttgtaagctgcgaggtcttcatcacagaaatcttcttcctattactcatgtgtgtatagaagaaggagaaaagcccatggtgatattgccttacatgaattgggggaatcttaaattgtttttacgacagtgcaagttagtagaggccaataatccacaggcaatttctcagcaagacctggtacacatggctattcagattgcctgtggaatgagctacctggccagaagggaagtcatccacaaagacctggctgccaggaactgtgtcattgatgacacacttcaagttaagatcacagacaatgccctctccagagacttgttccccatggactatcactgtctgggggacaatgaaaacaggccagttcattggatggctcttgaaagtctggttaataacgagttctctagcgctagtgatgtgtgggcctttggagtgacgctgtgggaactcatgactctgggccagactccctacgtggacattgaccccttcgagatggccgcatacctgaaagatggttaccgaatagcccagccaatcaactgtcctgatgaattatttgctgtgatggcctgttgctgggccttagatccagaggagaggcccaagtttcagcagctggtacagtgcctaacagagtttcatgcagccctgggggcctacgtctga

SEQ ID NO: 502 - DNA, 1815 bp, Homo sapiens
atgcgtggggcggcgcggctggggcggccgggccggagttgcctcccggggcccgcgctgagggccgccgccgcgcccgccctgctgcttgctcgttgcgctgttgccgctgctgccggcctgcgtgccgccgcccgtccgcggcccccggagctgcagtcggcttccgcggggcccagcgtgagtctctacctgagcgaggacgaggtgcgccggctgatcggtcttgatgcagaactttattatgtgagaaatgaccttattagtcactacgctctatcctttaatctgttagtacccagtgagacaaatttcctgcacttcacctggcatgcgaagtccaaggttgaatataagctgggattccaagtggacaatgttttggcaatggatatgccccaggtcaacatttctgttcagggggaagttccacgcactttatcagtgtttcgggtagagctttcctgtactggcaaagtagattctgaagttatgatactaatgcagctcaacttgacagtaaattcttcaaaaaattttaccgtcttaaattttaaacgaaggaaaatgtgctacaaaaaacttgaagaagtaaaaacttcagccttggacaaaaacactagcagaactatttatgatcctgtacatgcagctccaaccacttctacgcgtgtgttttatattagtgtaggggtttgttgtgcagtaatatttctcgtagcaataatattagctgttttgcaccttcataatatgaaaaggattgaactggatgacagcattagtgccagcagtagttcccaagggctgtctcagccatccacccagacgactcagtatctgagagcagacacgcccaacaatgcaactcctatcaccagttatcctaccttgcggatagagaagaacgacttgagaagtgtcactcttttggaggccaaaggcaaggtgaaggatatagcaatatccagagagaggataactctaaaagatgtactccaagaaggtacttttgggcgtattttccatgggattttaatagatgaaaaagatccaaataaagaaaaacaagcatttgtcaaaacagttaaagatcaagcttctgaaattcaggtgacaatgatgctcactgaaagttgtaagctgcgaggtcttcatcacagaaatcttcttcctattactcatgtgtgtatagaagaaggagaaaagcccatggtgatattgccttacatgaattgggggaatcttaaattgtttttacgacagtgcaagttagtagaggccaataatccacaggcaatttctcagcaagacctggtacacatggctattcagattgcctgtggaatgagctacctggccagaagggaagtcatccacaaagacctggctgccaggaactgtgtcattgatgacacacttcaagttaagatcacagacaatgccctctccagagacttgttccccatggactatcactgtctgggggacaatgaaaacaggccagttcgttggatggctcttgaaagtctggttaataacgagttctctagcgctagtgatgtgtgggcctttggagtgacgctgtgggaactcatgactctgggccagactccctacgtggacattgaccccttcgagatggccgcatacctgaaagatggttaccgaataacccagccaatcaactgtcctgatgaattatttgctgtgatggcctgttgctgggccttagatccagaggagaggcccaagtttcagcagctggtacagtgcctaacagagtttcatgcagccctgggggcctacgtctga

SEQ ID NO: 503 - DNA, 1909 bp, Homo sapiens
atggccagcagcggcatggctgacagcgccaaccacctgcccttctttttcggcaacatcacccgggaggaggcagaagattacctggtccagggggggcatgagtgatgggctttatttgctgcgccagagccgcaactacctgggtggcttcgccctgtccgtggcccacgggaggaaggcacaccactacaccatcgagcgggagctgaatggcacctacgccatcgccggtggcaggacccatgccagccccgccgacctctgccactaccactcccaggagtctgatggcctggtctgcctcctcaagaagcccttcaaccggccccaaggggtgcagcccaagactgggccctttgaggatttgaaggaaaacctcatcagggaatatgtgaagcagacatggaacctgcagggtcaggctctggagcaggccatcatcagtcagaagcctcagctggagaagctgatcgctaccacagcccatgaaaaaatgccttggttccatggaaaaatctctcgggaagaatctgagcaaattgtcctgataggatcaaagacaaatggaaagttcctgatccgagccagagacaacaacggctcctacgccctgtgcctgctgcacgaagggaaggtgctgcactatcgcatcgacaaagacaagacagggaagctctccatccccgagggaaagaagttcgacacgctctggcagctagtcgagcattattcttataaagcagatggtttgttaagagttcttactgtcccatgtcaaaaaatcggcacacagggaaatgttaattttggaggccgtccacaacttccaggttcccatcctgcgacttggtcagcgggtggaataatctcaagaatcaaatcatactccttcccaaagcctggccacagaaagtcctcccctgcccaagggaaccggcaagagagtactgtgtcattcaatccgtatgagccagaacttgcaccctgggctgcagacaaaggcccccagagagaagccctacccatggacacagaggtgtacgagagcccctacgcggaccctgaggagatcaggcccaaggaggtttacctggaccgaaagctgctgacgctggaagacaaagaactgggctctggtaattttggaactgtgaaaaagggctactaccaaatgaaaaaagttgtgaaaaccgtggctgtgaaaatactgaaaaacgaggccaatgaccccgctcttaaagatgagttattagcagaagcaaatgtcatgcagcagctggacaacccgtacatcgtgcgcatgatcgggatatgcgaggccgagtcctggatgctagttatggagatggcagaacttggtcccctcaataagtatttgcagcagaacagacatgtcaaggataagaacatcatagaactggttcatcaggtttccatgggcatgaagtacttggaggagagcaattttgtgcacagagatctggctgcaagaaatgtgttgctagttacccaacattatgccaagatcagtgatttcggactctccaaagcactgcgtgctgatgaaaactactacaaggcccagacccatggaaagtggcctgtcaagtggtacgctccggaatgcatcaactactacaagttctccagcaaaagcgatgtctggagctttggagtgttgatgtgggaagcattctcctatgggcagaagccatatcgagggatgaaaggaagtgaagtcaccgctatgttagagaaaggagagcggatggggtgccctgcagggtgtccaagagagatgtacgatctcatgaatctgtgctggacatacgatgtggaaaacaggcccggattcgcagcagtggaactgcggctgcgcaattactactatgacgtggtgaactaa

SEQ ID NO: 504 - DNA, 1908 bp, Homo sapiens
atggccagcagcggcatggctgacagcgccaaccacctgcccttctttttcggcaacatcacccgggaggaggcagaagattacctggtccaggggggcatgagtgatgggctttatttgctgcgccagagccgcaactacctgggtggcttcgccctgtccgtggcccacgggaggaaggcacaccactacaccatcgagcgggagctgaatggcacctacgccatcgccggtggcaggacccatgccagccccgccgacctctgccactaccactcccaggagtctgatggcctggtctgcctcctcaagaagcccttcaaccggccccaaggggtgcagcccaagactgggccctttgaggatttgaaggaaaacctcatcagggaatatgtgaagcagacatggaacctgcagggtcaggctctggagcaggccatcatcagtcagaagcctcagctggagaagctgatcgctaccacagcccatgaaaaaatgccttggttccatggaaaaatctctcgggaagaatctgagcaaattgtcctgataggatcaaagacaaatggaaagttcctgatccgagccagagacaacaacggctcctacgccctgtgcctgctgcacgaagggaaggtgctgcactatcgcatcgacaaagacaagacagggaagctctccatccccgagggaaagaagttcgacacgctctggcagctagtcgagcattattcttataaagcagatggtttgttaagagttcttactgtcccatgtcaaaaactcggcacacagggaaatgttaattttggaggccgtccacaacttccaggttcccatcctgcgacttggtcagcgggtggaataatctcaagaatcaaatcatactccttcccaaagcctggccacagaaagtcctcccctgcccaagggaaccggcaagagagtactgtgtcattcaatccgtatgagccagaacttgcaccctgggctgcagacaaaggcccccagagagaagccctacccatggacacagaggtgtacgagagcccctacgcggaccctgaggagatcaggcccaaggaggtttacctggaccgaaagctgctgacgctggaagacaaagaactgggctctggtaattttggaactgtgaaaaagggctactaccaaatgaaaaaagttgtgaaaaccgtggctgtgaaaatactgaaaaacgaggccaatgaccccgctcttaaagatgagttattagcagaagcaaatgtcatgcagcagctggacaacccgtacatcgtgcgcatgatcgggatatgcgaggccgagtcctggatgctagttatggagatggcagaacttggtcccctcaataagtatttgcagcagaacagacatgtcaaggataagaacatcatagaactggttcatcaggtttccatgggcatgaagtacttggaggagagcaattttgtgcacagagatctggctgcaagaaatgtgttgctagttacccaacattatgccaagatcagtgatttcggactctccaaagcactgcgtgctgatgaaaactactacaaggcccagacccatggaaagtggcctgtcaagtggtacgctccggaatgcatcaactactacaagttctccagcaaaagcgatgtctggagctttggagtgttgatgtgggaagcattctcctatgggcagaagccatatcgagggatgaaaggaagtgaagtcaccgctatgttagagaaaggagagcggatggggtgccctgcagggtgtccaagagagatgtacgatctcatgaatctgtgctggacatacgatgtggaaaacaggcccggattcgcagcagtggaactgcggctgcgcaattactactatgacgtggtgaactaa

SEQ ID NO: 505 - DNA, 1908 bp, Homo sapiens
atggccagcagcggcatggctgacagcgccaaccacctgcccttctttttcggcaacatcacccgggaggaggcagaagattacctggtccaggggggcatgagtgatgggctttatttgctgcgccagagccgcaactacctgggtggcttcgccctgtccgtggcccacgggaggaaggcacaccactacaccatcgagcgggagctgaatggcacctacgccatcgccggtggcaggacccatgccagccccgccgacctctgccactaccactcccaggagtctgatggcctggtctgcctcctcaagaagcccttcaaccggccccaaggggtgcagcccaagactgggccctttgaggatttgaaggaaaacctcatcagggaatatgtgaagcagacatggaacctgcagggtcaggctctggagcaggccatcatcagtcagaagcctcagctggagaagctgatcgctaccacagcccatgaaaaaatgccttggttccatggaaaaatctctcgggaagaatctgagcaaattgtcctgataggatcaaagacaaatggaaagttcctgatccgagccagagacaacaacggctcctacgccctgtgcctgctgcacgaagggaaggtgctgcactatcgcatcgacaaagacaagacagggaagctctccatccccgagggaaagaagttcgacacgctctggcagctagtcgagcattattcttataaagcagatggtttgttaagagttcttactgtcccatgtcaaaaaatcggcacacagggaaatgttaattttggaggccgtccacaacttccaggttcccatcctgcgacttggtcagcgggtggaataatctcaagaatcaaatcatactccttcccaaagcctggccacagaaagtcctcccctgcccaagggaaccggcaaaagagtactgtgtcattcaatccgtatgagccagaacttgcaccctgggctgcagacaaaggcccccagagagaagccctacccatggacacagaggtgtacgagagcccctacgcggaccctgaggagatcaggcccaaggaggtttacctggaccgaaagctgctgacgctggaagacaaagaactgggctctggtaattttggaactgtgaaaaagggctactaccaaatgaaaaaagttgtgaaaaccgtggctgtgaaaatactgaaaaacgaggccaatgaccccgctcttaaagatgagttattagcagaagcaaatgtcatgcagcagctggacaacccgtacatcgtgcgcatgatcgggatatgcgaggccgagtcctggatgctagttatggagatggcagaacttggtcccctcaataagtatttgcagcagaacagacatgtcaaggataagaacatcatagaactggttcatcaggtttccatgggcatgaagtacttggaggagagcaattttgtgcacagagatctggctgcaagaaatgtgttgctagttacccaacattatgccaagatcagtgatttcggactctccaaagcactgcgtgctgatgaaaactactacaaggcccagacccatggaaagtggcctgtcaagtggtacgctccggaatgcatcaactactacaagttctccagcaaaagcgatgtctggagctttggagtgttgatgtgggaagcattctcctatgggcagaagccatatcgagggatgaaaggaagtgaagtcaccgctatgttagagaaaggagagcggatggggtgccctgcagggtgtccaagagagatgtacgatctcatgaatctgtgctggacatacgatgtggaaaacaggcccggattcgcagcagtggaactgcggctgcgcaattactactatgacgtggtgaactaa

SEQ ID NO: 506 - DNA, 1908 bp, Homo sapiens
atggccagcagcggcatggctgacagcgccaaccacctgcccttctttttcggcaacatcacccgggaggaggcagaagattacctggtccaggggggcatgagtgatgggctttatttgctgcgccagagccgcaactacctgggtggcttcgccctgtccgtggcccacgggaggaaggcacaccactacaccatcgagcgggagctgaatggcacctacgccatcgccggtggcaggacccatgccagccccgccgacctctgccactaccactcccaggagtctgatggcctggtctgcctcctcaagaagcccttcaaccggccccaaggggtgcagcccaagactgggccctttgaggatttgaaggaaaacctcatcagggaatatgtgaagcagacatggaacctgcagggtcaggctctggagcaggccatcatcagtcagaagcctcagctggagaagctgatcgctaccacagcccatgaaaaaatgccttggttccatggaaaaatctctcgggaagaatctgagcaaattgtcctgataggatcaaagacaaatggaaagttcctgatccgagccagagacaacaacggctcctacgccctgtgcctgctgcacgaagggaaggtgctgcactatcgcatcgacaaagacaagacagggaagctctccatccccgagggaaagaagttcgacacgctctggcagctagtcgagcattattcttataaagcagatggtttgttaagagttcttactgtcccatgtcaaaaaatcggcacacagggaaatgttaattttggaggccgtccacaacttccaggttcccatcctgcgacttggtcagcgggtggaataatctcaagaatcaaatcatactccttcccaaagcctggccacagaaagtcctcccctgcccaagggaaccggcaagagagtactgtgtcattcaatccgtatgagccagaacttgcaccctgggctgcagacaaaggcccccagagagaagccctacccatggacacagaggtgtacgagagcccctacacggaccctgaggagatcaggcccaaggaggtttacctggaccgaaagctgctgacgctggaagacaaagaactgggctctggtaattttggaactgtgaaaaagggctactaccaaatgaaaaaagttgtgaaaaccgtggctgtgaaaatactgaaaaacgaggccaatgaccccgctcttaaagatgagttattagcagaagcaaatgtcatgcagcagctggacaacccgtacatcgtgcgcatgatcgggatatgcgaggccgagtcctggatgctagttatggagatggcagaacttggtcccctcaataagtatttgcagcagaacagacatgtcaaggataagaacatcatagaactggttcatcaggtttccatgggcatgaagtacttggaggagagcaattttgtgcacagagatctggctgcaagaaatgtgttgctagttacccaacattatgccaagatcagtgatttcggactctccaaagcactgcgtgctgatgaaaactactacaaggcccagacccatggaaagtggcctgtcaagtggtacgctccggaatgcatcaactactacaagttctccagcaaaagcgatgtctggagctttggagtgttgatgtgggaagcattctcctatgggcagaagccatatcgagggatgaaaggaagtgaagtcaccgctatgttagagaaaggagagcggatggggtgccctgcagggtgtccaagagagatgtacgatctcatgaatctgtgctggacatacgatgtggaaaacaggcccggattcgcagcagtggaactgcggctgcgcaattactactatgacgtggtgaactaa

SEQ ID NO: 507 - DNA, 1908 bp, Homo sapiens
atggccagcagcggcatggctgacagcgccaaccacctgcccttctttttcggcaacatcacccgggaggaggcagaagattacctggtccaggggggcatgagtgatgggctttatttgctgcgccagagccgcaactacctgggtggcttcgccctgtccgtggcccacgggaggaaggcacaccactacaccatcgagcgggagctgaatggcacctacgccatcgccggtggcaggacccatgccagccccgccgacctctgccactaccactcccaggagtctgatggcctggtctgcctcctcaagaagcccttcaaccggccccaaggggtgcagcccaagactgggccctttgaggatttgaaggaaaacctcatcagggaatatgtgaagcagacatggaacctgcagggtcaggctctggagcaggccatcatcagtcagaagcctcagctggagaagctgatcgctaccacagcccatgaaaaaatgccttggttccatggaaaaatctctcgggaagaatctgagcaaattgtcctgataggatcaaagacaaatggaaagttcctgatccgagccagagacaacaacggctcctacgccctgtgcctgctgcacgaagggaaggtgctgcactatcgcatcgacaaagacaagacagggaagctctccatccccgagggaaagaagttcgacacgctctggcagctagtcgagcattattcttataaagcagatggtttgttaagagttcttactgtcccatgtcaaaaaatcggcacacagggaaatgttaattttggaggccgtccacaacttccaggttcccatcctgcgacttggtcagcgggtggaataatctcaagaatcaaatcatactccttcccaaagcctggccacagaaagtcctcccctgcccaagggaaccggcaagagagtactgtgtcattcaatccgtatgagccagaacttgcaccctgggctgcagacaaaggcccccagagagaagccctacccatggacacagaggtgtacgagagcccctacgcggaccctgaggagatcaggcccaaggaggtttacctggaccgaaagctgctgacgctggaagacaaagaactgggctctggtaattttggaactgtgaaaaagggctactaccaaatgaaaaaagttgtgaaaaccgtggctgtgaaaatactgaaaaacgaggccaatgaccccgctcttaaagatgagttattagcagaagcaaatgtcatgcagcagctggacaacccgtacatcgtgcgcatgatcgggatatgcgaggccgagtcctggatgctagttatggagatggcagaacttggtcccctcaataagtatttgcagcagaacagacatgtcaaggataagaacatcatagaactggttcatcaggtttccatgggcatgaagtacttggaggagagcaattttgtgcacagagatctggctgcaagaaatgtgttgctagttacccaacattatgccaagatcagtgatttcggactctccaaagcactgagtgctgatgaaaactactacaaggcccagacccatggaaagtggcctgtcaagtggtacgctccggaatgcatcaactactacaagttctccagcaaaagcgatgtctggagctttggagtgttgatgtgggaagcattctcctatgggcagaagccatatcgagggatgaaaggaagtgaagtcaccgctatgttagagaaaggagagcggatggggtgccctgcagggtgtccaagagagatgtacgatctcatgaatctgtgctggacatacgatgtggaaaacaggcccggattcgcagcagtggaactgcggctgcgcaattactactatgacgtggtgaactaa

SEQ ID NO: 508 - DNA, 1908 bp, Homo sapiens
atggccagcagcggcatggctgacagcgccaaccacctgcccttctttttcggcaacatcacccgggaggaggcagaagattacctggtccaggggggcatgagtgatgggctttatttgctgcgccagagccgcaactacctgggtggcttcgccctgtccgtggcccacgggaggaaggcacaccactacaccatcgagcgggagctgaatggcacctacgccatcgccggtggcaggacccatgccagccccgccgacctctgccactaccactcccaggagtctgatggcctggtctgcctcctcaagaagcccttcaaccggccccaaggggtgcagcccaagactgggccctttgaggatttgaaggaaaacctcatcagggaatatgtgaagcagacatggaacctgcagggtcaggctctggagcaggccatcatcagtcagaagcctcagctggagaagctgatcgctaccacagcccatgaaaaaatgccttggttccatggaaaaatctctcgggaagaatctgagcaaattgtcctgataggatcaaagacaaatggaaagttcctgatccgagccagagacaacaacggctcctacgccctgtgcctgctgcacgaagggaaggtgctgcactatcgcatcgacaaagacaagacagggaagctctccatccccgagggaaagaagttcgacacgctctggcagctagtcgagcattattcttataaagcagatggtttgttaagagttcttactgtcccatgtcaaaaaatcggcacacagggaaatgttaattttggaggccgtccacaacttccaggttcccatcctgcgacttggtcagcgggtggaataatctcaagaatcaaatcatactccttcccaaagcctggccacagaaagtcctcccctgcccaagggaaccggcaagagagtactgtgtcattcaatccgtatgagccagaacttgcaccctgggctgcagacaaaggcccccagagagaagccctacccatggacacagaggtgtacgagagcccctacgcggaccctgaggagatcaggcccaaggaggtttacctggaccgaaagctgctgacgctggaagacaaagaactgggctctggtaattttggaactgtgaaaaagggctactaccaaatgaaaaaagttgtgaaaaccgtggctgtgaaaatactgaaaaacgaggccaatgaccccgctcttaaagatgagttattagcagaagcaaatgtcatgcagcagctggacaacccgtacatcgtgcgcatgatcgggatatgcgaggccgagtcctggatgctagttatggagatggcagaacttggtcccctcaataagtatttgcagcagaacagacatgtcaaggataagaacatcatagaactggttcatcaggtttccatgggcatgaagtacttggaggagagcaattttgtgcacagagatctggctgcaagaaatgtgttgctagttacccaacattatgccaagatcagtgatttcggactctccaaagcactgcgtgctgatgaaaactactacaaggcccagacccatggaaagtggcctgtcaagtggtacgctccggaatgcatcaactactacaagttctccagcaaaagcgatgtctggagctttggagtgttgatgtgggaagcattctcctatgggcagaagccatatcgagggatgaaaggaagtgaagtcaccgctatgttagagaaaggagagcggatggggtgccctgcagggtgtccaagagagatgtacgatctcatgaatctgtgctggacatacgatgtggaaaacaggcccggattcgcagcagcggaactgcggctgcgcaattactactatgacgtggtgaactaa

SEQ ID NO: 509 - DNA, 1896 bp, Homo sapiens
atgaattttaacactattttggaggagattcttattaagaggtcacagcagaaaaagaagacatcgcccttaaactacaaagagagactttttgtacttacaaagtccatgctaacctactatgagggtcgagcagagaagaaatacagaaaggggtttattgatgtttcaaaaatcaagtgtgtggaaatagtgaagaatgatgatggtgtcattccctgtcaaaataagtatccatttcaggttgttcatgatgctaacacacgttacatttttgcacctagtccacaaagcagggacctgtgggtgaagaagttaaaagaagaaataaagaacaacaataatattatgattaaatatcatcctaaattctggacagatggaagttatcagtgttgtagacaaactgaaaaattagcacccggatgtgaaaaatacaatctttttgagagcagtataagaaaagcactacctccagcaccagaaacaaagaagcgaaggcctcccccaccaattccactagaagaagaagataatagtgaagaaatcgttgtagccatgtatgatttccaagcagcagaaggacatgatctcagattagagagaggccaagagtatctcattttagaaaagaatgatgtgcattggtggagagcaagagataaatatgggaatgaaggatatatcccaagtaattacgtaacgggaaagaaatcaaacaacttagatcaatatgaatggtattgcagaaatatgaatagaagcaaggcagagcaactcctccgcagtgaagataaagaaggtggttttatggtaagggattccagtcaaccaggcttgtacacagtctccctttataccaagtttggaggagaaggttcatcgggttttaggcattatcatataaaggaaacaacaacatctccaaagaagtattacctagctgaaaaacatgcttttggctccattcctgagattattgaatatcataagcacaatgcagcaggacttgtcaccaggcttcggtacccagttagtgtgaaagggaagaatgcacccaccactgcaggattcagctatgagaaatgggagattaacccttcagaactgacctttatgagggaattgggaagtggactgtttggagtggtgaggcttggcaaatggcgagcccagtacaaagtcgcaatcaaagctattcgggaaggtgcaatgtgcgaggaggactttatagaagaagctaaagtgatgatgaagctgacacacccgaagttagtgcagctttatggtgtgtgcacccagcagaaaccaatatacattgttactgagttcatggaaaggggctgccttctgaatttcctccgacagagacaaggtcatttcagtagagacgtactgctgagcatgtgtcaggatgtgtgtgaagggatggagtatctggagagaaacagcttcatccacagagatctggctgccagaaattgtctagtaagtgaggcgggagttgtaaaagtatctgattttggaatggccaggtattttctggatgatcagtacacaagttcttctggtgctaagtttcctgtgaagtggtgtccacctgaagtgtttaattacagccgcttcagcagcaaatcagatgtctggtcatttggtgttttaatgtgggaagtattcacggaaggcagaatgccttttgaaaaatacaccaattatgaagtggtaaccatggttactcgaggccaccgactctaccagccgaagttggcgtccaactatgtgtatgaggtgatgctgagatgttggcaggagaaaccagagggaaggccttctttcgaagatctgctgcgcacaatagatgaactagttgaatgtgaagaaacttttggaagataa

SEQ ID NO: 510 - DNA, 1896 bp, Homo sapiens
atgaattttaacactattttggaggagattcttattaagaggtcacagcagaaaaagaagacatcgcccttaaactacaaagagagactttttgtacttacaaagtccatgctaacctactatgagggtcgagcagagaagaaatacagaaaggggtttattgatgtttcaaaaatcaagtgtgtggaaatagtgaagaatgatgatggtgtcattccctgtcaaaataagtatccatttcaggttgttcatgatgctaacacactttacatttttgcacctagtccacaaagcagggacctgtgggtgaagaagttaaaagaagaaataaagaacaacaataatattatgattaaatatcatcctaaattctggacagatggaagttatcagtgttgtagacaaactgaaaaattagcacccggatgtgaaaaatacaatctttttgagagcagtataagaaaagcactacctccagcaccagaaacaaagaagcgaaggcctcccccaccaattccactagaagaagaagataatagtgaagaaatcgttgtagccatgtatgatttccaagcagcagaaggacatgatctcagattagagagaggccaagagtatctcattttagaaaagaatgatgtgcattggtggagagcaagagataaatatgggaatgaaggatatatcccaagtaattacgtaacgggaaagaaatcaaacaacttagatcaatatgaatggtattgcagaaatatgaatagaagcaaggcagagcaactcctccgcagtgaagataaagaaggtggttttatggtaagggattccagtcaaccaggcttgtacacagtctccctttataccaagtttggaggagaaggttcatcgggttttaggcattatcatataaaggaaacaacaacatctccaaagaagtattacctagctgaaaaacatgcttttggctccattcctgagattattgaatatcataagcacaatgcagcaggacttgtcaccaggcttcggtacccagttagtgtgaaagggaagaatgcacccaccactgcaggattcagctatgagaaatgggagattaacccttcagaactgacctttatgagggaattgggaagtggactgtttggagtggtgaggcttggcaaatggcgagcccagtacaaagtcgcaatcaaagctattcgggaaggtgcaatgtgcgaggaggactttatagaagaagctaaagtgatgatgaagctgacacacccgaagttagtgcagctttatggtgtgtgcacccagcagaaaccaatatacattgttactgagttcatggaaaggggctgccttctgaatttcctccgacagagacaaggtcatttcagtagagacgtactgctgagcatgtgtcaggatgtgtgtgaagggatggagtatctggagagaaacagcttcatccacagagatctggctgccagaaattgtctagtaagtgaggcgggagttgtaaaagtatctgattttggaatggccaggtattttctggatgatcagtacacaagttcttctggtgctaagtttcctgtgaagcggtgtccacctgaagtgtttaattacagccgcttcagcagcaaatcagatgtctggtcatttggtgttttaatgtgggaagtattcacggaaggcagaatgccttttgaaaaatacaccaattatgaagtggtaaccatggttactcgaggccaccgactctaccagccgaagttggcgtccaactatgtgtatgaggtgatgctgagatgttggcaggagaaaccagagggaaggccttctttcgaagatctgctgcgcacaatagatgaactagttgaatgtgaagaaacttttggaagataa

SEQ ID NO: 511 - DNA, 1896 bp, Homo sapiens
atgaattttaacactattttggaggagattcttattaagaggtcacagcagaaaaagaagacatcgcccttaaactacaaagagagactttttgtacttacaaagtccatgctaacctactatgagggtcgagcagagaagaaatacagaaaggggtttattgatgtttcaaaaatcaagtgtgtggaaatagtgaagaatgatgatggtgtcattccctgtcaaaataagtatccatttcaggttgttcatgatgctaacacactttacatttttgcacctagtccacaaagcagggacctgtgggtgaagaagttaaaagaagaaataaagaacaacaataatattatgattaaatatcatcctaaattctggacagatggaagttatcagtgttgtagacaaactgaaaaattagcacccggatgtgaaaaatacaatctttttgagagcagtataagaaaagcactacctccagcaccagaaacaaagaagcgaaggcctcccccaccaattccactagaagaagaagataatagtgaagaaatcgttgtagccatgtatgatttccaagcagcagaaggacatgatctcagattagagagaggccaagagtatctcattttagaaaagaatgatgtgcattggtggagagcaagagataaatatgggaatgaaggatatatcccaagtaattacgtaacgggaaagaaatcaaacaacttagatcaatatgaatggtattgcagaaatatgaatagaagcaaggcagagcaactcctccgcagtgaagataaagaaggtggttttatggtaagggattccagtcaaccaggcttgtacacagtctccctttataccaagtttggaggagaaggttcatcgggttttaggcattatcatataaaggaaacaacaacatctccaaagaagtattacctagctgaaaaacatgcttttggctccattcctgagattattgaatatcataagcacaatgcagcaggacttgtcaccaggcttcggtacccagttagtgtgaaagggaagaatgcacccaccactgcaggattcagctatgagaaatgggagattaacccttcagaactgacctttatgagggaattgggaagtggactgtttggagtggtgaggcttggcaaatggcgagcccagtacaaagtcgcaatcaaagctattcgggaaggtgcaatgtgcgaggaggactttatagaagaagctaaagtgatgatgaagctgacacacccgaagttagtgcagctttatggtgtgtgcacccagcagaaaccaatatacattgttactgagttcatggaaaggggctgccttctgaatttcctccgacagagacaaggtcatttcagtagagacgtactgctgagcatgtgtcaggatgtgtgtgaagggatggagtatctggagagaaacagcttcatccacagagatctggctgccagaaattgtctagtaagtgaggcgggagttgtaaaagtatctgattttggaatggccaggtattttctggatgatcagtacacaagttcttctggtgctaagtttcctgtgaagtggtgtccacctgaagtgtttaattacagccgcttcagcagcaaatcagatgtctggtcatttggtgttttaatgtgggaagtattcacggaaggcagaatgccttttgaaaaatacaccaattatgaagtggtaaccatggttactcgaggccaccgactctaccagctgaagttggcgtccaactatgtgtatgaggtgatgctgagatgttggcaggagaaaccagagggaaggccttctttcgaagatctgctgcgcacaatagatgaactagttgaatgtgaagaaacttttggaagataa

SEQ ID NO: 512 - DNA, 3375 bp, Homo sapiens
atggactctttagccagcttagttctctgtggagtcagcttgctcctttctggaactgtggaaggtgccatggacttgatcttgatcaattccctacctcttgtatctgatgctgaaacatctctcacctgcattgcctctgggtggcgcccccatgagcccatcaccataggaagggactttgaagccttaatgaaccagcaccaggatccgctggaagttactcaagatgtgaccagagaatgggctaaaaaagttgtttggaagagagaaaaggctagtaagatcaatggtgcttatttctgtgaagggcgagttcgaggagaggcaatcaggatacgaaccatgaagatgcgtcaacaagcttccttcctaccagctactttaactatgactgtggacaagggagataacgtgaacatatctttcaaaaaggtattgattaaagaagaagatgcagtgatttacaaaaatggttccttcatccattcagtgccccggcatgaagtacctgatattctagaagtacacctgcctcatgctcagccccaggatgctggagtgtactcggccaggtatataggaggaaacctcttcacctcggccttcaccaggctgatagtccggagatgtgaagcccagaagtggggacctgaatgcaaccatctctgtactgcttgtatgaacaatggtgtctgccatgaagatactggagaatgcatttgccctcctgggtttatgggaaggacgtgtgagaaggcttgtgaactgcacacgtttggcagaacttgtaaagaaaggtgcagtggacaagagggatgcaagtcttatgtgttctgtctccctgacccctatgggtgttcctgtgccacaggctggaagggtctgcagtgcaatgaagcatgccaccctggtttttacgggccagattgtaagcttaggtgcagctgcaacaatggggagatgtgtgatcgcttccaaggatgtctctgctctccaggatggcaggggctccagtgtgagagagaaggcataccgaggatgaccccaaagatagtggatttgccagatcatatagaagtaaacagtggtaaatttaatcccatttgcaaagcttctggctggccgctacctactaatgaagaaatgaccctggtgaagccggatgggacagtgctccatccaaaagactttaaccatacggatcatttctcagtagccatattcaccatccaccggatcctcccccctgactcaggagtttgggtctgcagtgtgaacacagtggctgggatggtggaaaagcccttcaacatttctgttaaagttcttccaaagcccctgaatgccccaaacgtgattgacactggacataactttgctgtcatcaacatcagctctgagccttactttggggatggaccaatcaaatccaagaagcttctatacaaacccgttaatcactatgaggcttggcaacatattcaagtgacaaatgagattgttacactcaactatttggaacctcggacagaatatgaactctgtgtgcaactggtccgtcgtggagagggtggggaagggcatcctggacctgtgagacgcttcacaacagcttctatcggactccctcctccaagaggtctaaatctcctgcctaaaagtcagaccactctaaatttgacctggcaaccaatatttccaagctcggaagatgacttttatgttgaagtggagagaaggtctgtgcaaaaaagtgatcagcagaatattaaagttccaggcaacttgacttcggtgctacttaacaacttacatcccagggagcagtacgtggtccgaactagagtcaacaccaaggcccagggggaatggagtgaagatctcactgcttggacccttagtgacattcttcctcctcaaccagaaaacatcaagatttccaacattacacactcctcagctgtgatttcttggacaatattggatggctattctatttcttctattactatccgttacaaggttcaaggcaagaatgaagaccagcacgttgatgtgaagataaagaatgccaccatcactcagtatcagctcaagggcctagagcctgaaacagcataccaggtggacatttttgcagagaacaacatagggtcaagcaacccagccttttctcatgaactggtgaccctcccagaatctcaagcaccagcggacctcggaggggggaagatgctgcttatagccatccttggctctgctggaatgacctgcctgactgtgctgttggcctttctgatcatattgcaattgaagagggcaaatgtgcaaaggagaatggcccaagccttccaaaacgtgagggaagaaccagctgtgcagttcaactcagggactctggccctaaacaggaaggtcaaaaacaacccagatcctacaatttatccagtgcttgactggaatgacatcaaatttcaagatgtgattggggagggcaattttggccaagttcttaaggcgcgcatcaagaaggatgggttacggatggatgctgccatcaaaagaatgaaagaatatgcctccaaagatgatcacagggactttgcaggagaactggaagttctttgtaaacttggacaccatccaaacatcatcaatctcttaggagcatgtgaacatcgaggctacttgtacctggccattgagtacgcgccccatggaaaccttctggacttccttcgcaagagccgtgtgctggagacggacccagcatttgccattgccaatagcaccgcgtccacactgtcctcccagcagctccttcacttcgctgccgacgtggcccggggcatggactacttgagccaaaaacagtttatccacagggatctggctgccagaaacattttagttggtgaaaactatgtggcaaaaatagcagattttggattgtcccgaggtcaagaggtgtatgtgaaaaagacaatgggaaggctcccagtgcgctggatggccatcgagtcactgaattacagtgtgtacacaaccaacagtgatgtatggtcctatggtgtgttactatgggagattgttagcttaggaggcacaccctactgcgggatgacttgtgcagaactctacgagaagctgccccagggctacagactggagaagcccctgaactgtgatgatgaggtgtatgatctaatgagacaatgctggcgggagaagccttatgagaggccatcatttgcccagatattggtgtccttaaacagaatgttagaggagcgaaagacctacgtgaataccacgctttatgagaagtttacttatgcaggaattgactgttctgctgaagaagcggcctag

SEQ ID NO: 513 - DNA, 3375 bp, Homo sapiens
atggactctttagccagcttagttctctgtggagtcagcttgctcctttctggaactgtggaaggtgccatggacttgatcttgatcaattccctacctcttgtatctgatgctgaaacatctctcacctgcattgcctctgggtggcgcccccatgagcccatcaccataggaagggactttgaagccttaatgaaccagcaccaggatccgctggaagttactcaagatgtgaccagagaatgggctaaaaaagttgtttggaagagagaaaaggctagtaagatcaatggtgcttatttctgtgaagggcgagttcgaggagaggcaatcaggatacgaaccatgaagatgcgtcaacaagcttccttcctaccagctactttaactatgactgtggacaagggagataacgtgaacatatctttcaaaaaggtattgattaaagaagaagatgcagtgatttacaaaaatggttccttcatccattcagtgccccggcatgaagtacctgatattctagaagtacacctgcctcatgctcagccccaggatgctggagtgtactcggccaggtatataggaggaaacctcttcacctcggccttcaccaggctgatagtccggagatgtgaagcccagaagtggggacctgaatgcaaccatctctgtactgcttgtatgaacaatggtgtctgccatgaagatactggagaatgcatttgccctcctgggtttatgggaaggacgtgtgagaaggcttgtgaactgcacacgtttggcagaacttgtaaagaaaggtgcagtggacaagagggatgcaagtcttatgtgttctgtctccctgacccctatgggtgttcctgtgccacaggctggaagggtctgcagtgcaatgaagcatgccaccctggtttttacgggccagattgtaagcttaggtgcagctgcaacaatggggagatgtgtgatcgcttccaaggatgtctctgctctccaggatggcaggggctccagtgtgagagagaaggcataccgaggatgaccccaaagatagtggatttgccagatcatatagaagtaaacagtggtaaatttaatcccatttgcaaagcttctggctggccgctacctactaatgaagaaatgaccctggtgaagccggatgggacagtgctccatccaaaagactttaaccatacggatcatttctcagtagccatattcaccatccaccggatcctcccccctgactcaggagtttgggtctgcagtgtgaacacagtggctgggatggtggaaaagcccttcaacatttctgttaaagttcttccaaagcccctgaatgccccaaacgtgattgacactggacataactttgctgtcatcaacatcagctctgagccttactttggggatggaccaatcaaatccaagaagcttctatacaaacccgttaatcactatgaggcttggcaacatattcaagtgacaaatgagattgttacactcaactatttggaacctcggacagaatatgaactctgtgtgcaactggtccgtcgtggagagggtggggaagggcatcctggacctgtgagacgcttcacaacagcttctatcggactccctcctccaagaggtctaaatctcctgcctaaaagtcagaccactctaaatttgacctggcaaccaatatttccaagctcggaagatgacttttatgttgaagtggagagaaggtctgtgcaaaaaagtgatcagcagaatattaaagttccaggcaacttgacttcggtgctacttaacaacttacatcccagggagcagtacgtggtccgagctagagtcaacaccaaggcccagggggaatggagtgaagatctcactgcttggacccttagtgacattcttcctcctcaaccagaaaacatcaagatttccaacattacacactcctcagctgtgatttcttggacaatattggatggctattctatttcttctattactatccgttacaaggttcaaggcaagaatgaagaccagcacgttgatgtgaagataaagaatgccaccatcactcagtatcagctcaagggcctagagcctgaaacagcataccaggtggacatttttgcagagaacaacatagggtcaagcaacccagccttttctcatgaactggtgaccctcccagaatctcaagcaccagcggacctcggaggggggaagatgctgcttatagccatccttggctctgctggaatgacctgcctgactgtgctgttggcctttctgatcatattgcaattgaagagggcaaatgtgcaaaggagaatggcccaagccttccaaaacgtgagggaagaaccagctgtgcagttcaactcagggactctggccctaaacaggaaggtcaaaaacaacccagatcctacaatttatccagtgcttgactggaatgacatcaaatttcaagatgtgattggggagggcaattttggccaagttcttaaggcgcgcatcaagaaggatgggttacggatggatgctgccatcaaaagaatgaaagaatatgcctccaaagatgatcacagggactttgcaggagaactggaagttctttgtaaacttggacaccatccaaacatcatcaatctcttaggagcatgtgaacatcgaggctacttgtacctggccattgagtacgcgccccatggaaaccttctggacttccttcgcaagagccgtgtgctggagacggacccagcatttgccattgccaatagcaccgcgtccacactgtcctcccagcagctccttcacttcgctgccgacgtggcccggggcatggactacttgagccaaaaacagtttatccacagggatctggctgccagaaacattttagttggtgaaaactatgtggcaaaaatagcagattttggattgtcccgaggtcaagaggtgtatgtgaaaaagacaatgggaaggctcccagtgcgctggatgaccatcgagtcactgaattacagtgtgtacacaaccaacagtgatgtatggtcctatggtgtgttactatgggagattgttagcttaggaggcacaccctactgcgggatgacttgtgcagaactctacgagaagctgccccagggctacagactggagaagcccctgaactgtgatgatgaggtgtatgatctaatgagacaatgctggcgggagaagccttatgagaggccatcatttgcccagatattggtgtccttaaacagaatgttagaggagcgaaagacctacgtgaataccacgctttatgagaagtttacttatgcaggaattgactgttctgctgaagaagcggcctag

SEQ ID NO: 514 - DNA, 3417 bp, Homo sapiens
atggtctggcgggtgccccctttcttgctccccatcctcttcttggcttctcatgtgggcgcggcggtggacctgacgctgctggccaacctgcggctcacggacccccagcgcttcttcctgacttgcgtgtctggggaggccggggcggggaggggctcggacgcctggggcccgcccctgctgctggagaaggacgaccgtatcgtgcgcaccccgcccgggccacccctgcgcctggcgcgcaacggttcgcaccaggtcacgcttcgcggcttctccaagccctcggacctcgtgggcgtcttctcctgcgtgggcggtgctggggcgcggcgcacgcgcgtcatctacgtgcacaacagccctggagcccacctgcttccagacaaggtcacacacactgtgaacaaaggtgacaccgctgtactttctgcacgtgtgcacaaggagaagcagacagacgtgatctggaagagcaacggatcctacttctacaccctggactggcatgaagcccaggatgggcggttcctgctgcagctcccaaatgtgcagccaccatcgagcggcatctacagtgccacttacctggaagccagccccctgggcagcgccttctttcggctcatcgtgcggggttgtggggctgggcgctgggggccaggctgtaccaaggagtgcccaggttgcctacatggaggtgtctgccacgaccatgacggcgaatgtgtatgcccccctggcttcactggcacccgctgtgaacaggcctgcagagagggccgttttgggcagagctgccaggagcagtgcccaggcatatcaggctgccggggcctcaccttctgcctcccagacccctatggctgctcttgtggatctggctggagaggaagccagtgccaagaagcttgtgcccctggtcattttggggctgattgccgactccagtgccagtgtcagaatggtggcacttgtgaccggttcagtggttgtgtctgcccctctgggtggcatggagtgcactgtgagaagtcagaccggatcccccagatcctcaacatggcctcagaactggagttcaacttagagacgatgccccggatcaactgtgcagctgcagggaaccccttccccgtgcggggcagcatagagctacgcaagccagacggcactgtgctcctgtccaccaaggccattgtggagccagagaagaccacagctgagttcgaggtgccccgcttggttcttgcggacagtgggttctgggagtgccgtgtgtccacatctggcggccaagacagccggcgcttcaaggtcaatgtgaaagtgccccccgtgcccctggctgcacctcggctcctgaccaagcagagccgccagcttgtggtctccccgctggtcttgttctctggggatggacccatctccactgtccgcctgcactaccggccccaggacagtaccatggactggtcgaccattgtggtggaccccagtgagaacgtgacgttaatgaacctgaggccaaagacaggatacagtgttcgtgtgcagctgagccggccaggggaaggaggagagggggcctgggggcctcccaccctcatgaccacagactgtcctgagcctttgttgcagccgtggttggagggctggcatgtggaaggcactgaccggctgcgagtgagctggtccttgcccttggtgcccgggccactggtgggcgacggtttcctgctgcgcctgtgggacgggacacgggggcaggagcggcgggagaacgtctcatccccccaggcccgcactgccctcctgacgggactcacgcctggcacccactaccagctggatgtgcagctctaccactgcaccctcctgggcccggcctcgccccctgcacacgtgcttctgccccccagtgggcctccagccccccgacacctccacgcccaggccctctcagactccgagatccagctgacatggaagcacccggaggctctgcctgggccaatatccaagtacgttgtggaggtgcaggtggctgggggtgcaggagacccactgtggatagacgtggacaggcctgaggagacaagcaccatcatccgtggcctcaacgccagcacgcgctacctcttccgcatgcgggccagcattcaggggctcggggactggagcaacacagtagaagagtccaccctgggcaacgggctgcaggctgagggcccagtccaagagagccgggcagctgaagagggcctggatcagcagctgatcctggcggtggtgggctccgtgtctgccacctgcctcaccatcctggccgcccttttaaccctggtgtgcatccgcagaagctgcctgcatcggagacgcaccttcacctaccagtcaggctcgggcgaggagaccatcctgcagttcagctcagggaccttgacacttacccggcggccaaaactgcagcccgagcccctgagctacccagtgctagagtgggaggacatcacctttgaggacctcatcggggaggggaacttcggccaggtcatccgggccatgatcaagaaggacgggctgaagatgaacgcagccatcaaaatgctgaaagagtatgcctctgaaaatgaccatcgtgactttgcgggagaactggaagttctgtgcaaattggggcatcaccccaacatcatcaacctcctgggggcctgtaagaaccgaggttacttgtatatcgctattgaatatgccccctacgggaacctgctagattttctgcggaaaagccgggtcctagagactgacccagcttttgctcgagagcatgggacagcctctacccttagctcccggcagctgctgcgtttcgccagtgatgcggccaatggcatgcagtacctgagtgagaagcagttcatccacagggacctggctgcccggaatgtgctggtcggagagaacctagcctccaagattgcagacttcggcctttctcggggagaggaggtttatgtgaagaagacgatggggcgtctccctgtgcgctggatggccattgagtccctgaactacagtgtctataccaccaagagtgatgtctggtcctttggagtccttctttgggagatagtgagccttggaggtacaccctactgtggcatgacctgtgccgagctctatgaaaagctgccccagggctaccgcatggagcagcctcgaaactgtgacgatgaagtgtacgagctgatgcgtcagtgctggcgggaccgtccctatgagcgacccccctttgcccagattgcgctacagctaggccgcatgctggaagccaggaaggcctatgtgaacatgtcgctgtttgagaacttcacttacgcgggcattgatgccacagctgaggaggcctga

SEQ ID NO: 515 - DNA, 3417 bp, Homo sapiens
atggtctggcgggtgccccctttcttgctccccatcctcttcttggcttctcatgtgggcgcggcggtggacctgacgctgctggccaacctgcggctcacggacccccagcgcttcttcctgacttgcgtgtctggggaggccggggcggggaggggctcggacgcctggggcccgcccctgctgctggagaaggacgaccgtatcgtgcgcaccccgcccgggccacccctgcgcctggcgcgcaacggttcgcaccaggtcacgcttcgcggcttctccaagccctcggacctcgtgggcgtcttctcctgcgtgggcggtgctggggcgcggcgcacgcgcgtcatctacgtgcacaacagccctggagcccacctgcttccagacaaggtcacacacactgtgaacaaaggtgacaccgctgtactttctgcacgtgtgcacaaggagaagcagacagacgtgatctggaagagcaacggatcctacttctacaccctggactggcatgaagcccaggatgggcggttcctgctgcagctcccaaatgtgcagccaccatcgagcggcatctacagtgccacttacctggaagccagccccctgggcagcgccttctttcggctcatcgtgcggggttgtggggctgggcgctgggggccaggctgtaccaaggagtgcccaggttgcctacatggaggtgtctgccacgaccatgacggcgaatgtgtatgcccccctggcttcactggcacccgctgtgaacaggcctgcagagagggccgttttgggcagagctgccaggagcagtgcccaggcatatcaggctgccggggcctcaccttctgcctcccagacccctatggctgctcttgtggatctggctggagaggaagccagtgccaagaagcttgtgcccctggtcattttggggctgattgccgactccagtgccagtgtcagaatggtggcacttgtgaccggttcagtggttgtgtctgcccctctgggtggcatggagtgcactgtgagaagtcagaccggatcccccagatcctcaacatggcctcagaactggagttcaacttagagacgatgccccggatcaactgtgcagctgcagggaaccccttccccgtgcggggcagcatagagctacgcaagccagacggcactgtgctcctgtccaccaaggccattgtggagccagagaagaccacagctgagttcgaggtgccccgcttggttcttgcggacagtgggttctgggagtgccgtgtgtccacatctggcggccaagacagccggcgcttcaaggtcaatgtgaaagtgccccccgtgcccctggctgcacctcggctcctgaccaagcagagccgccagcttgtggtctccccgctggtctcgttctctggggatggacccatctccactgtccgcctgcactaccggccccaggacagtaccatggactggtcgaccattgtggtggaccccagtgagaacgtgacgttaatgaacctgaggccaaagacaggatacagtgttcgtgtgcagctgagccggccaggggaaggaggagagggggcctgggggcctcccaccctcatgaccacagactgtcctgagcctttgttgcagccgtggttggagggctggcatgtggaaggcactgaccggctgcgagtgagctggtccttgcccttggtgcccgggccactggtgggcgacggtttcctgctgcgcctgtgggacgggacacgggggcaggagcggcgggagaacgtctcatccccccaggcccgcactgccctcctgacgggactcacgcctggcacccactaccagctggatgtgcagctctaccactgcaccctcctgggcccggcctcgccccctgcacacgtgcttctgccccccagtgggcctccagccccccgacacctccacgcccaggccctctcagactccgagatccagctgacatggaagcacccggaggctctgcctgggccaatatccaagtacgttgtggaggtgcaggtggctgggggtgcaggagacccactgtggatagacgtggacaggcctgaggagacaagcaccatcatccgtggcctcaacgccagcacgcgctacctcttccgcatgcgggccagcattcaggggctcggggactggagcaacacagtagaagagtccaccctgggcaacgggctgcaggctgagggcccagtccaagagagccgggcagctgaagagggcctggatcagcagctgatcctggcggtggtgggctccgtgtctgccacctgcctcaccatcctggccgcccttttaaccctggtgtgcatccgcagaagctgcctgcatcggagacgcaccttcacctaccagtcaggctcgggcgaggagaccatcctgcagttcagctcagggaccttgacacttacccggcggccaaaactgcagcccgagcccctgagctacccagtgctagagtgggaggacatcacctttgaggacctcatcggggaggggaacttcggccaggtcatccgggccatgatcaagaaggacgggctgaagatgaacgcagccatcaaaacgctgaaagagtatgcctctgaaaatgaccatcgtgactttgcgggagaactggaagttctgtgcaaattggggcatcaccccaacatcatcaacctcctgggggcctgtaagaaccgaggttacttgtatatcgctattgaatatgccccctacgggaacctgctagattttctgcggaaaagccgggtcctagagactgacccagcttttgctcgagagcatgggacagcctctacccttagctcccggcagctgctgcgtttcgccagtgatgcggccaatggcatgcagtacctgagtgagaagcagttcatccacagggacctggctgcccggaatgtgctggtcggagagaacctagcctccaagattgcagacttcggcctttctcggggagaggaggtttatgtgaagaagacgatggggcgtctccctgtgcgctggatggccattgagtccctgaactacagtgtctataccaccaagagtgatgtctggtcctttggagtccttctttgggagatagtgagccttggaggtacaccctactgtggcatgacctgtgccgagctctatgaaaagctgccccagggctaccgcatggagcagcctcgaaactgtgacgatgaagtgtacgagctgatgcgtcagtgctggcgggaccgtccctatgagcgacccccctttgcccagattgcgctacagctaggccgcatgctggaagccaggaaggcctatgtgaacatgtcgctgtttgagaacttcacttacgcgggcattgatgccacagctgaggaggcctga

SEQ ID NO: 516 - DNA, 2001 bp, Homo sapiens
atgcttcccgaggctggctccctgtggctactgaagctgctccgggacatccagttggcccagttttactggcccatcctagaggagcttaatgtcacccggccagggcacttcgactttgtaaagcctgaggacctggacggcattggcatgggccggcctgcccaacgcagactgtccgaagctctgaaaagcctacgttctgggcctaagtctaagaactgggtctacaagatccttggaggttttgcccctgagcacaaggagcccaccctgcccacggacagcccacggcacctccctgagccagaggggggcctcaagtgtctgatcccagagggtgctgtttgcagaggggagctgctgggttcaggctgcttcggtgtggtgcaccgagggctgtggacgctgcccagtggcaagagtgtcccagtggctgtcaagtccctccgggtaggtcccgaaggcccgatgggcacagaactgggggacttcctgcgagaggtatcggtcatgatgaacttggagcacccacacgtgctgcgtctgcacggccttgtactgggccagcctctgcagatggtgatggagctggcgccactgggctccctgcacgcgcgcttaacggccccggccccgacacccccgctgctcgtggccctgctctgcctcttcctgcggcagctggcgggagccatggcgtacctgggggcccgcgggctggtgcaccgagacctcgctacgcgcaacctacagctggcgtcgccgcgcaccatcaaggtggctgacttcgggctggtgcggcctctgggcggtgcccggggccgctacgtcatgggcgggccccgccctatcccctacacctggtgtgccccagagagcctgcgccacggagacttctcgtctgcctcggacgtgtggatgtttggggtgacgctgtgggagatgttctccgggggcgaggaaccctggcccggggtcccaccgtacctcatcctgcagcggctggaggacagagcccggctgcctaggcctcccccctcctccagggccctctactccctcgccttgcgctgctgggccccccaccctgccgaccggcctagcttttcccacctggaggggctgctgcaagaggccgggccttcggaagcatgttgtgtgagggatgccacagaaccaggcgccctgaggatggagactggtgaccccatcacagtcatcgagggcagctcctctttccacagccccgactccacaatctggaaggaccagaatggtcgcaccttcaaagtgggcagcttcccagcctcggcagtgacgctgacagatgcggggggcttgccagccacccgtccagtccacagaggcacccctgcccggggagatcaacacccaggaagcatagatggagacagaaagaaggcaaatctttgggatgcgcccccagcacggggccagaggaggaacatgcccctggagaggatgaaaggcatttccaggagtctggagtcagttctgtccctcggtcctcgtcccacagggggtggttcaagcccccctgaaattcgacaagccagagctgtgccccagggacctccaggcctgcctccacgcccacctttatcctctagctctcctcagcccagccagccctctagggagaggcttccctggcccgaaagaaaacccccacacaatcaccccatgggaatgcctggagcccgtaaagccgctgccctctctggaggcctcttgtccgatcctgagttgcagaggaagattatggaaatggagctgagtgtgcattgggtcacccaccaggagtgccagacagcactaggagccactgggggagatgtggcttctgccatccggaacctcaaggtagatcagctcttcctcctgagtagccggtccagagctgactgctggcgcatcctggagcattaccagtgggacctctcagctgccagccgttatgtcctggccaggccctga

SEQ ID NO: 517 - DNA, 3564 bp, Homo sapiens
atgcctctgcgccactgggggatggccaggggcagtaagcccgttggggatggagcccagcccatggctgccatgggaggcctgaaggtgcttctgcactgggctggtccaggcggcggggagccctgggtcactttcagtgagtcatcgctgacaactgaggaagtctgcatccacattgcacataaagttggtatcactcctccttgcttcaatctctttgccctcttcgatgctcaggcccaagtctggttgcccccaaaccacatcctagagatccccagagatgcaagcctgatgctatatttccgcataaggttttatttccggaactggcatggcatgaatcctcgggaaccggctgtgtaccgttgtgggcccccaggaaccgaggcatcctcagatcagacagcacaggggatgcaactcctggacccagcctcatttgagtacctctttgagcagggcaagcatgagtttgtgaatgacgtggcatcactgtgggagctgtcgaccgaggaggagatccaccactttaagaatgagagcctgggcatggcctttctgcacctctgtcacctcgctctccgccatggcatccccctggaggaggtggccaagaagaccagcttcaaggactgcatcccgcgctccttccgccggcatatccggcagcacagcgccctgacccggctgcgccttcggaacgtcttccgcaggttcctgcgggacttccagccgggccgactctcccagcagatggtcatggtcaaatacctagccacactcgagcggctggcaccccgcttcggcacagagcgtgtgcccgtgtgccacctgaggctgctggcccaggccgagggggagccctgctacatccgggacagtggggtggcccctacagaccctggccctgagtctgctgctgggcccccaacccacgaggtgctggtgacaggcactggtggcatccagtggtggccagtagaggaggaggtgaacaaggaggagggttctagtggcagcagtggcaggaacccccaagccagcctgtttgggaagaaggccaaggctcacaaggcagtcggccagccggcagacaggccgcgggagccactgtgggcctacttctgtgacttccgggacatcacccacgtggtgctgaaagagcactgtgtcagcatccaccggcaggacaacaagtgcctggagctgagcttgccttcccgggctgcggcgctgtccttcgtgtcgctggtggacggctatttccgcctgacggccgactccagccactacctgtgccacgaggtggctcccccacggctggtgatgagcatccgggatgggatccacggacccctgctggagccatttgtgcaggccaagctgcggcccgaggacggcctgtacctcattcactggagcaccagccacccctaccgcctgatcctcacagtggcccagcgtagccaggcaccagacggcatgcagagcttgcggctccgaaagttccccattgagcagcaggacggggccttcgtgctggagggctggggccggtccttccccagcgttcgggaacttggggctgccttgcagggctgcttgctgagggccggggatgactgcttctctctgcgtcgctgttgcctgccccaaccaggagaaacctccaatctcatcatcatgcggggggctcgggccagccccaggacactcaacctcagccagctcagcttccaccgggttgaccagaaggagatcacccagctgtcccacttgggccagggcacaaggaccaacgtgtatgagggccgcctgcgagtggagggcagcggggaccctgaggagggcaagatggatgacgaggaccccctcgtgcctggcagggaccgtgggcaggagctacgagtggtgctcaaagtgctggaccctagtcaccatgacatcgccctggccttctacgagacagccagcctcatgagccaggtctcccacacgcacctggccttcgtgcatggcgtctgtgtgcgcggccctgaaaatatcatggtgacagagtacgtggagcacggacccctggatgtgtggctgcggagggagcggggccatgtgcccatggcttggaagatggtggtggcccagcagctggccagcgccctcagctacctggagaacaagaacctggttcatggtaatgtgtgtggccggaacatcctgctggcccggctggggttggcagagggcaccagccccttcatcaagctgagtgatcctggcgtgggcctgggcgccctctccagggaggagcgggtggagaggatcccctggctggcccccgaatgcctaccaggtggggccaacagcctaagcaccgccatggacaagtgggggtttggcgccaccctcctggagatctgctttgacggagaggcccctctgcagagccgcagtccctccgagaaggagcatttctaccagaggcagcaccggctgcccgagccctcctgcccacagctggccacactcaccagccagtgtctgacctatgagccaacccagaggccatcattccgcaccatcctgcgtgacctcacccggctgcagccccacaatcttgctgacgtcttgactgtgaacccggactcaccggcgtcggaccctacggttttccacaagcgctatttgaaaaagatccgagatctgggcgagggtcacttcggcaaggtcagcttgtactgctacgatccgaccaacgacggcactggcgagatggtggcggtgaaagccctcaaggcagactgcggcccccagcaccgctcgggctggaagcaggagattgacattctgcgcacgctctaccacgagcacatcatcaagtacaagggctgctgcgaggaccaaggcgagaagtcgctgcagctggtcatggagtacgtgcccctgggcagcctccgagactacctgccccggcacagcatcgggctggcccagctgctgctcttcgcccagcagatctgcgagggcatggcctatctgcactcgcagcactacatccaccgagacctagccgcgcgcaacgtgctgctggacaacgacaggctggtcaagatcggggactttggcctagccaaggccgtgcccgaaggccacgagtactaccgcgtgcgcgaggatggggacagccccgtgttctggtatgccccagagtgcctgaaggagtataagttctactatgcgtcagatgtctggtccttcggggtgaccctgtatgagctgctgacgcactgtgactccagccagagcccccccacgaaattccttgagctcataggcattgctcagggtcagatgacagttctgagactcactgagttgctggaacgaggggagaggctgccacggcccgacaaatgtccctgtgaggtctatcatctcatgaagaactgctgggagacagaggcgtcctttcgcccaaccttcgagaacctcatacccattctgaagacagtccatgagaagtaccaaggccaggccccttcagtgttcagcgtgtgctga

SEQ ID NO: 518 - DNA, 3209 bp, Homo sapiens
atgcctctgcgccactgggggatggccaggggcagtaagcccgttggggatggagcccagcccatggctgccatgggaggcctgaaggtgcttctgcactgggctggtccaggcggcggggagccctgggtcactttcagtgagtcatcgctgacagctgaggaagtctgcatccacattgcacataaagttggtatcactcctccttgcttcaatctctttgccctcttcgatgctcaggcccaagtctggttgcccccaaaccacatcctagagatccccagagatgcaagcctgatgctatatttccgcataaggttttatttccggaactggcatggcatgaatcctcgggaaccggctgtgtaccgttgtgggcccccaggaaccgaggcatcctcagatcagacagcacaggggatgcaactcctggacccagcctcatttgagtacctctttgagcagggcaagcatgagtttgtgaatgacgtggcatcactgtgggagctgtcgaccgaggaggagatccaccactttaagaatgagagcctgggcatggcctttctgcacctctgtcacctcgctctccgccatggcatccccctggaggaggtggccaagaagaccagcttcaaggactgcatcccgcgctccttccgccggcatatccggcagcacagcgccctgacccggctgcgccttcggaacgtcttccgcaggttcctgcgggacttccagccgggccgactctcccagcagatggtcatggtcaaatacctagccacactcgagcggctggcaccccgcttcggcacagagcgtgtgcccgtgtgccacctgaggctgctggcccaggccgagggggagccctgctacatccgggacagtggggtggcccctacagaccctggccctgagtctgctgctgggcccccaacccacgaggtgctggtgacaggcactggtggcatccagtggtggccagtagaggaggaggtgaacaaggaggaggggagccatttgtgcaggccaagctgcggcccgaggacggcctgtacctcattcactggagcaccagccacccctaccgcctgatcctcacagtggcccagcgtagccaggcaccagacggcatgcagagcttgcggctccgaaagttccccattgagcagcaggacggggccttcgtgctggagggctggggccggtccttccccagcgttcgggaacttggggctgccttgcagggctgcttgctgagggccggggatgactgcttctctctgcgtcgctgttgcctgccccaaccaggagaaacctccaatctcatcatcatgcggggggctcgggccagccccaggacactcaacctcagccagctcagcttccaccgggttgaccagaaggagatcacccagctgtcccacttgggccagggcacaaggaccaacgtgtatgagggccgcctgcgagtggagggcagcggggaccctgaggagggcaagatggatgacgaggaccccctcgtgcctggcagggaccgtgggcaggagctacgagtggtgctcaaagtgctggaccctagtcaccatgacatcgccctggccttctacgagacagccagcctcatgagccaggtctcccacacgcacctggccttcgtgcatggcgtctgtgtgcgcggccctgaaaatatcatggtgacagagtacgtggagcacggacccctggatgtgtggctgcggagggagcggggccatgtgcccatggcttggaagatggtggtggcccagcagctggccagcgccctcagctacctggagaacaagaacctggttcatggtaatgtgtgtggccggaacatcctgctggcccggctggggttggcagagggcaccagccccttcatcaagctgagtgatcctggcgtgggcctgggcgccctctccagggaggagcgggtggagaggatcccctggctggcccccgaatgcctaccaggtggggccaacagcctaagcaccgccatggacaagtgggggtttggcgccaccctcctggagatctgctttgacggagaggcccctctgcagagccgcagtccctccgagaaggagcatttctaccagaggcagcaccggctgcccgagccctcctgcccacagctggccacactcaccagccagtgtctgacctatgagccaacccagaggccatcattccgcaccatcctgcgtgacctcacccggctgcagccccacaatcttgctgacgtcttgactgtgaacccggactcaccggcgtcggaccctacggttttccacaagcgctatttgaaaaagatccgagatctgggcgagggtcacttcggcaaggtcagcttgtactgctacgatccgaccaacgacggcactggcgagatggtggcggtgaaagccctcaaggcagactgcggcccccagcaccgctcgggctggaagcaggagattgacattctgcgcacgctctaccacgagcacatcatcaagtacaagggctgctgcgaggaccaaggcgagaagtcgctgcagctggtcatggagtacgtgcccctgggcagcctccgagactacctgccccggcacagcatcgggctggcccagctgctgctcttcgcccagcagatctgcgagggcatggcctatctgcactcgcagcactacatccaccgagacctagccgcgcgcaacgtgctgctggacaacgacaggctggtcaagatcggggactttggcctagccaaggccgtgcccgaaggccacgagtactaccgcgtgcgcgaggatggggacagccccgtgttctggtatgccccagagtgcctgaaggagtataagttctactatgcgtcagatgtctggtccttcggggtgaccctgtatgagctgctgacgcactgtgactccagccagagcccccccacgaaattccttgagctcataggcattgctcagggtcagatgacagttctgagactcactgagttgctggaacgaggggagaggctgccacggcccgacaaatgtccctgtgaggtctatcatctcatgaagaactgctgggagacagaggcgtcctttcgcccaaccttcgagaacctcatacccattctgaagacagtccatgagaagtaccaaggccaggccccttcagtgttcagcgtgtgctga

SEQ ID NO: 519 - DNA, 3564 bp, Homo sapiens
atgcctctgcgccactgggggatggccaggggcagtaagcccgttggggatggagcccagcccatggctgccatgggaggcctgaaggtgcttctgcactgggctggtccaggcggcggggagccctgggtcactttcagtgagtcatcgctgacagctgaggaagtctgcatccacattgcacataaagttggtatcactcctccttgcttcaatctctttgccctcttcgatgctcaggcccaagtctggttgcccccaaaccacatcctagagatccccagagatgcaagcctgatgctatatttccgcataaggttttatttccggaactggcatggcatgaatcctcgggaaccggctgtgtaccgttgtgggcccccaggaaccgaggcatcctcagatcagacagcacaggggatgcaactcctggacccagcctcatttgagtacctctttgagcagggcaagcatgagtttgtgaatgacgtggcatcactgtgggagctgtcgaccgaggaggagatccaccactttaagaatgagagcctgggcatggcctttctgcacctctgtcacctcgctctccgccatggcatccccctggaggaggtggccaagaagaccagcttcaaggactgcatcccgcgctccttccgccggcatatccggcagcacagcgccctgacccggctgcgccttcggaacgtcttccgcaggttcctgcgggacttccagccgggccgactctcccagcagatggtcatggtcaaatacctagccacactcgagcggctggcaccccgcttcggcacagagcgtgtgcccgtgtgccacctgaggctgctggcccaggccgagggggagccctgctacatccgggacagtggggtggcccctacagaccctggccctgagtctgctgctgggcccccaacccacgaggtgctggtgacaggcactggtggcatccagtggtggccagtagaggaggaggtgaacaaggaggagggttctagtggcagcagtggcaggaacccccaagccagcctgtttgggaagaaggccaaggctcacaaggcagtcggccagccggcagacaggccgcgggagccactgtgggcctacttctgtgacttccgggacatcacccacgtggtgctgaaagagcactgtgtcagcatccaccggcaggacaacaagtgcctggagctgagcttgccttcccgggctgcggcgctgtccttcgtgtcgctggtggacggctatttccgcctgacggccgactccagccactacctgtgccacgaggtggctcccccacggctggtgatgagcatccgggatgggatccacggacccctgctggagccatttgtgcaggccaagctgcggcccgaggacggcctgtacctcattcactggagcaccagccacccctaccgcctgatcctcacagtggcccagcgtagccaggcaccagacggcatgcagagcttgcggctccgaaagttccccattgagcagcaggacggggccttcgtgctggagggctggggccggtccttccccagcgttcgggaacttggggctgccttgcagggctgcttgctgagggccggggatgactgcttctctctgcgtcgctgttgcctgccccaaccaggagaaacctccaatctcatcatcatgcggggggctcgggccagccccaggacactcaacctcagccagctcagcttccaccgggttgaccagaaggagatcacccagctgtcccacttgggccagggcacaaggaccaacgtgtatgagggccgcctgcgagtggagggcagcggggaccctgaggagggcaagatggatgacgaggaccccctcgtgcctggcagggaccgtgggcaggagctacgagtggtgctcaaagtgctggaccctagtcaccatgacatcgccctggccttctacgagacagccagcctcatgagccaggtctcccacacgcacctggccttcgtgcatggcgtctgtgtgcgcggccctgaaaatatcatggtgacagagtacgtggagcacggacccctggatgtgtggctgcggacggagcggggccatgtgcccatggcttggaagatggtggtggcccagcagctggccagcgccctcagctacctggagaacaagaacctggttcatggtaatgtgtgtggccggaacatcctgctggcccggctggggttggcagagggcaccagccccttcatcaagctgagtgatcctggcgtgggcctgggcgccctctccagggaggagcgggtggagaggatcccctggctggcccccgaatgcctaccaggtggggccaacagcctaagcaccgccatggacaagtgggggtttggcgccaccctcctggagatctgctttgacggagaggcccctctgcagagccgcagtccctccgagaaggagcatttctaccagaggcagcaccggctgcccgagccctcctgcccacagctggccacactcaccagccagtgtctgacctatgagccaacccagaggccatcattccgcaccatcctgcgtgacctcacccggctgcagccccacaatcttgctgacgtcttgactgtgaacccggactcaccggcgtcggaccctacggttttccacaagcgctatttgaaaaagatccgagatctgggcgagggtcacttcggcaaggtcagcttgtactgctacgatccgaccaacgacggcactggcgagatggtggcggtgaaagccctcaaggcagactgcggcccccagcaccgctcgggctggaagcaggagattgacattctgcgcacgctctaccacgagcacatcatcaagtacaagggctgctgcgaggaccaaggcgagaagtcgctgcagctggtcatggagtacgtgcccctgggcagcctccgagactacctgccccggcacagcatcgggctggcccagctgctgctcttcgcccagcagatctgcgagggcatggcctatctgcactcgcagcactacatccaccgagacctagccgcgcgcaacgtgctgctggacaacgacaggctggtcaagatcggggactttggcctagccaaggccgtgcccgaaggccacgagtactaccgcgtgcgcgaggatggggacagccccgtgttctggtatgccccagagtgcctgaaggagtataagttctactatgcgtcagatgtctggtccttcggggtgaccctgtatgagctgctgacgcactgtgactccagccagagcccccccacgaaattccttgagctcataggcattgctcagggtcagatgacagttctgagactcactgagttgctggaacgaggggagaggctgccacggcccgacaaatgtccctgtgaggtctatcatctcatgaagaactgctgggagacagaggcgtcctttcgcccaaccttcgagaacctcatacccattctgaagacagtccatgagaagtaccaaggccaggccccttcagtgttcagcgtgtgctga

SEQ ID NO: 520 - DNA, 3564 bp, Homo sapiens
atgcctctgcgccactgggggatggccaggggcagtaagcccgttggggatggagcccagcccatggctgccatgggaggcctgaaggtgcttctgcactgggctggtccaggcggcggggagccctgggtcactttcagtgagtcatcgctgacagctgaggaagtctgcatccacattgcacataaagttggtatcactcctccttgcttcaatctctttgccctcttcgatgctcaggcccaagtctggttgcccccaaaccacatcctagagatccccagagatgcaagcctgatgctatatttccgcataaggttttatttccggaactggcatggcatgaatcctcgggaaccggctgtgtaccgttgtgggcccccaggaaccgaggcatcctcagatcagacagcacaggggatgcaactcctggacccagcctcatttgagtacctctttgagcagggcaagcatgagtttgtgaatgacgtggcatcactgtgggagctgtcgaccgaggaggagatccaccactttaagaatgagagcctgggcatggcctttctgcacctctgtcacctcgctctccgccatggcatccccctggaggaggtggccaagaagaccagcttcaaggactgcatcccgcgctccttccgccggcatatccggcagcacagcgccctgacccggctgcgccttcggaacgtcttccgcaggttcctgcgggacttccagccgggccgactctcccagcagatggtcatggtcaaatacctagccacactcgagcggctggcaccccgcttcggcacagagcgtgtgcccgtgtgccacctgaggctgctggcccaggccgagggggagccctgctacatccgggacagtggggtggcccctacagaccctggccctgagtctgctgctgggcccccaacccacgaggtgctggtgacaggcactggtggcatccagtggtggccagtagaggaggaggtgaacaaggaggagggttctagtggcagcagtggcaggaacccccaagccagcctgtttgggaagaaggccaaggctcacaaggcagtcggccagccggcagacaggccgcgggagccactgtgggcctacttctgtgacttccgggacatcacccacgtggtgctgaaagagcactgtgtcagcatccaccggcaggacaacaagtgcctggagctgagcttgccttcccgggctgcggcgctgtccttcgtgtcgctggtggacggctatttccgcctgacggccgactccagccactacctgtgccacgaggtggctcccccacggctggtgatgagcatccgggatgggatccacggacccctgctggagccatttgtgcaggccaagctgcggcccgaggacggcctgtacctcattcactggagcaccagccacccctaccgcctgatcctcacagtggcccagcgtagccaggcaccagacggcatgcagagcttgcggctccgaaagttccccattgagcagcaggacggggccttcgtgctggagggctggggccggtccttccccagcgttcgggaacttggggctgccttgcagggctgcttgctgagggccggggatgactgcttctctctgcgtcgctgttgcctgccccaaccaggagaaacctccaatctcatcatcatgcggggggctcgggccagccccaggacactcaacctcagccagctcagcttccaccgggttgaccagaaggagatcacccagctgtcccacttgggccagggcacaaggaccaacgtgtatgagggccgcctgcgagtggagggcagcggggaccctgaggagggcaagatggatgacgaggaccccctcgtgcctggcagggaccgtgggcaggagctacgagtggtgctcaaagtgctggaccctagtcaccatgacatcgccctggccttctacgagacagccagcctcatgagccaggtctcccacacgcacctggccttcgtgcatggcgtctgtgtgcgcggccctgaaaatatcatggtgacagagtacgtggagcacggacccctggatgtgtggctgcggagggagcggggccatgtgcccatggcttggaagatggtggtggcccagcagctggccagcgccctcagctacctggagaacaagaacctggttcatggtaatgtgtgtggccggaacatcctgctggcccggctggggttggcagagggcaccagccccttcatcaagctgagtgatcctggcgtgggcctgggcgccctctccagggaggagcgggtggagaggatcccctggctggcccccgaatgcctaccaggtggggccaacagcctaagcaccgccatggacaagtgggggtttggcgccaccctcctggagatctgctttgacggagaggcccctctgcagagccgcagtccctccgagaaggagcatttctaccagaggcagcaccggctgcccgagccctcctgcccacagctggccacactcaccagccagtgtctgacctatgagccaacccagaggccatcattccgcaccatcctgcgtgacctcacccggctgcagccccacaatcttgctgacgtcttgactgtgaacccgaactcaccggcgtcggaccctacggttttccacaagcgctatttgaaaaagatccgagatctgggcgagggtcacttcggcaaggtcagcttgtactgctacgatccgaccaacgacggcactggcgagatggtggcggtgaaagccctcaaggcagactgcggcccccagcaccgctcgggctggaagcaggagattgacattctgcgcacgctctaccacgagcacatcatcaagtacaagggctgctgcgaggaccaaggcgagaagtcgctgcagctggtcatggagtacgtgcccctgggcagcctccgagactacctgccccggcacagcatcgggctggcccagctgctgctcttcgcccagcagatctgcgagggcatggcctatctgcactcgcagcactacatccaccgagacctagccgcgcgcaacgtgctgctggacaacgacaggctggtcaagatcggggactttggcctagccaaggccgtgcccgaaggccacgagtactaccgcgtgcgcgaggatggggacagccccgtgttctggtatgccccagagtgcctgaaggagtataagttctactatgcgtcagatgtctggtccttcggggtgaccctgtatgagctgctgacgcactgtgactccagccagagcccccccacgaaattccttgagctcataggcattgctcagggtcagatgacagttctgagactcactgagttgctggaacgaggggagaggctgccacggcccgacaaatgtccctgtgaggtctatcatctcatgaagaactgctgggagacagaggcgtcctttcgcccaaccttcgagaacctcatacccattctgaagacagtccatgagaagtaccaaggccaggccccttcagtgttcagcgtgtgctga

SEQ ID NO: 521 - DNA, 3564 bp, Homo sapiens
atgcctctgcgccactgggggatggccaggggcagtaagcccgttggggatggagcccagcccatggctgccatgggaggcctgaaggtgcttctgcactgggctggtccaggcggcggggagccctgggtcactttcagtgagtcatcgctgacagctgaggaagtctgcatccacattgcacataaagttggtatcactcctccttgcttcaatctctttgccctcttcgatgctcaggcccaagtctggttgcccccaaaccacatcctagagatccccagagatgcaagcctgatgctatatttccgcataaggttttatttccggaactggcatggcatgaatcctcgggaaccggctgtgtaccgttgtgggcccccaggaaccgaggcatcctcagatcagacagcacaggggatgcaactcctggacccagcctcatttgagtacctctttgagcagggcaagcatgagtttgtgaatgacgtggcatcactgtgggagctgtcgaccgaggaggagatccaccactttaagaatgagagcctgggcatggcctttctgcacctctgtcacctcgctctccgccatggcatccccctggaggaggtggccaagaagaccagcttcaaggactgcatcccgcgctccttccgccggcatatccggcagcacagcgccctgacccggctgcgccttcggaacgtcttccgcaggttcctgcgggacttccagccgggccgactctcccagcagatggtcatggtcaaatacctagccacactcgagcggctggcaccccgcttcggcacagagcgtgtgcccgtgtgccacctgaggctgctggcccaggccgagggggagccctgctacatccgggacagtggggtggcccctacagaccctggccctgagtctgctgctgggcccccaacccacgaggtgctggtgacaggcactggtggcatccagtggtggccagtagaggaggaggtgaacaaggaggagggttctagtggcagcagtggcaggaacccccaagccagcctgtttgggaagaaggccaaggctcacaaggcagtcggccagccggcagacaggccgcgggagccactgtgggcctacttctgtgacttccgggacatcacccacgtggtgctgaaagagcactgtgtcagcatccaccggcaggacaacaagtgcctggagctgagcttgccttcccgggctgcggcgctgtccttcgtgtcgctggtggacggctatttccgcctgacggccgactccagccactacctgtgccacgaggtggctcccccacggctggtgatgagcatccgggatgggatccacggacccctgctggagccatttgtgcaggccaagctgcggcccgaggacggcctgtacctcattcactggagcaccagccacccctaccgcctgatcctcacagtggcccagcgtagccaggcaccagacggcatgcagagcttgcggctccgaaagttccccattgagcagcaggacggggccttcgtgctggagggctggggccggtccttccccagcgttcgggaacttggggctgccttgcagggctgcttgctgagggccggggatgactgcttctctctgcgtcgctgttgcctgccccaaccaggagaaacctccaatctcatcatcatgcggggggctcgggccagccccaggacactcaacctcagccagctcagcttccaccgggttgaccagaaggagatcacccagctgtcccacttgggccagggcacaaggaccaacgtgtatgagggccgcctgcgagtggagggcagcggggaccctgaggagggcaagatggatgacgaggaccccctcgtgcctggcagggaccgtgggcaggagctacgagtggtgctcaaagtgctggaccctagtcaccatgacatcgccctggccttctacgagacagccagcctcatgagccaggtctcccacacgcacctggccttcgtgcatggcgtctgtgtgcgcggccctgaaaatatcatggtgacagagtacgtggagcacggacccctggatgtgtggctgcggagggagcggggccatgtgcccatggcttggaagatggtggtggcccagcagctggccagcgccctcagctacctggagaacaagaacctggttcatggtaatgtgtgtggccggaacatcctgctggcccggctggggttggcagagggcaccagccccttcatcaagctgagtgatcctggcgtgggcctgggcgccctctccagggaggagcgggtggagaggatcccctggctggcccccgaatgcctaccaggtggggccaacagcctaagcaccgccatggacaagtgggggtttggcgccaccctcctggagatctgctttgacggagaggcccctctgcagagccgcagtccctccgagaaggagcatttctaccagaggcagcaccggctgcccgagccctcctgcccacagctggccacactcaccagccagtgtctgacctatgagccaacccagaggccatcattccgcaccatcctgcgtgacctcacccggctgcagccccacaatcttgctgacgtcttgactgtgaacccggactcaccggcgtcggaccctacggttttccacaagcgctatttgaaaaagatccaagatctgggcgagggtcacttcggcaaggtcagcttgtactgctacgatccgaccaacgacggcactggcgagatggtggcggtgaaagccctcaaggcagactgcggcccccagcaccgctcgggctggaagcaggagattgacattctgcgcacgctctaccacgagcacatcatcaagtacaagggctgctgcgaggaccaaggcgagaagtcgctgcagctggtcatggagtacgtgcccctgggcagcctccgagactacctgccccggcacagcatcgggctggcccagctgctgctcttcgcccagcagatctgcgagggcatggcctatctgcactcgcagcactacatccaccgagacctagccgcgcgcaacgtgctgctggacaacgacaggctggtcaagatcggggactttggcctagccaaggccgtgcccgaaggccacgagtactaccgcgtgcgcgaggatggggacagccccgtgttctggtatgccccagagtgcctgaaggagtataagttctactatgcgtcagatgtctggtccttcggggtgaccctgtatgagctgctgacgcactgtgactccagccagagcccccccacgaaattccttgagctcataggcattgctcagggtcagatgacagttctgagactcactgagttgctggaacgaggggagaggctgccacggcccgacaaatgtccctgtgaggtctatcatctcatgaagaactgctgggagacagaggcgtcctttcgcccaaccttcgagaacctcatacccattctgaagacagtccatgagaagtaccaaggccaggccccttcagtgttcagcgtgtgctga

SEQ ID NO: 522 - DNA, 3564 bp, Homo sapiens
atgcctctgcgccactgggggatggccaggggcagtaagcccgttggggatggagcccagcccatggctgccatgggaggcctgaaggtgcttctgcactgggctggtccaggcggcggggagccctgggtcactttcagtgagtcatcgctgacagctgaggaagtctgcatccacattgcacataaagttggtatcactcctccttgcttcaatctctttgccctcttcgatgctcaggcccaagtctggttgcccccaaaccacatcctagagatccccagagatgcaagcctgatgctatatttccgcataaggttttatttccggaactggcatggcatgaatcctcgggaaccggctgtgtaccgttgtgggcccccaggaaccgaggcatcctcagatcagacagcacaggggatgcaactcctggacccagcctcatttgagtacctctttgagcagggcaagcatgagtttgtgaatgacgtggcatcactgtgggagctgtcgaccgaggaggagatccaccactttaagaatgagagcctgggcatggcctttctgcacctctgtcacctcgctctccgccatggcatccccctggaggaggtggccaagaagaccagcttcaaggactgcatcccgcgctccttccgccggcatatccggcagcacagcgccctgacccggctgcgccttcggaacgtcttccgcaggttcctgcgggacttccagccgggccgactctcccagcagatggtcatggtcaaatacctagccacactcgagcggctggcaccccgcttcggcacagagcgtgtgcccgtgtgccacctgaggctgctggcccaggccgagggggagccctgctacatccgggacagtggggtggcccctacagaccctggccctgagtctgctgctgggcccccaacccacgaggtgctggtgacaggcactggtggcatccagtggtggccagtagaggaggaggtgaacaaggaggagggttctagtggcagcagtggcaggaacccccaagccagcctgtttgggaagaaggccaaggctcacaaggcagtcggccagccggcagacaggccgcgggagccactgtgggcctacttctgtgacttccgggacatcacccacgtggtgctgaaagagcactgtgtcagcatccaccggcaggacaacaagtgcctggagctgagcttgccttcccgggctgcggcgctgtccttcgtgtcgctggtggacggctatttccgcctgacggccgactccagccactacctgtgccacgaggtggctcccccacggctggtgatgagcatccgggatgggatccacggacccctgctggagccatttgtgcaggccaagctgcggcccgaggacggcctgtacctcattcactggagcaccagccacccctaccgcctgatcctcacagtggcccagcgtagccaggcaccagacggcatgcagagcttgcggctccgaaagttccccattgagcagcaggacggggccttcgtgctggagggctggggccggtccttccccagcgttcgggaacttggggctgccttgcagggctgcttgctgagggccggggatgactgcttctctctgcgtcgctgttgcctgccccaaccaggagaaacctccaatctcatcatcatgcggggggctcgggccagccccaggacactcaacctcagccagctcagcttccaccgggttgaccagaaggagatcacccagctgtcccacttgggccagggcacaaggaccaacgtgtatgagggccgcctgcgagtggagggcagcggggaccctgaggagggcaagatggatgacgaggaccccctcgtgcctggcagggaccgtgggcaggagctacgagtggtgctcaaagtgctggaccctagtcaccatgacatcgccctggccttctacgagacagccagcctcatgagccaggtctcccacacgcacctggccttcgtgcatggcgtctgtgtgcgcggccctgaaaatatcatggtgacagagtacgtggagcacggacccctggatgtgtggctgcggagggagcggggccatgtgcccatggcttggaagatggtggtggcccagcagctggccagcgccctcagctacctggagaacaagaacctggttcatggtaatgtgtgtggccggaacatcctgctggcccggctggggttggcagagggcaccagccccttcatcaagctgagtgatcctggcgtgggcctgggcgccctctccagggaggagcgggtggagaggatcccctggctggcccccgaatgcctaccaggtggggccaacagcctaagcaccgccatggacaagtgggggtttggcgccaccctcctggagatctgctttgacggagaggcccctctgcagagccgcagtccctccgagaaggagcatttctaccagaggcagcaccggctgcccgagccctcctgcccacagctggccacactcaccagccagtgtctgacctatgagccaacccagaggccatcattccgcaccatcctgcgtgacctcacccggctgcagccccacaatcttgctgacgtcttgactgtgaacccggactcaccggcgtcggaccctacggttttccacaagcgctatttgaaaaagatccgagatctgggcgagggtcacttcggcaaggtcagcttgtactgctacgatccgaccaacgacggcactggcgagatggtggtggtgaaagccctcaaggcagactgcggcccccagcaccgctcgggctggaagcaggagattgacattctgcgcacgctctaccacgagcacatcatcaagtacaagggctgctgcgaggaccaaggcgagaagtcgctgcagctggtcatggagtacgtgcccctgggcagcctccgagactacctgccccggcacagcatcgggctggcccagctgctgctcttcgcccagcagatctgcgagggcatggcctatctgcactcgcagcactacatccaccgagacctagccgcgcgcaacgtgctgctggacaacgacaggctggtcaagatcggggactttggcctagccaaggccgtgcccgaaggccacgagtactaccgcgtgcgcgaggatggggacagccccgtgttctggtatgccccagagtgcctgaaggagtataagttctactatgcgtcagatgtctggtccttcggggtgaccctgtatgagctgctgacgcactgtgactccagccagagcccccccacgaaattccttgagctcataggcattgctcagggtcagatgacagttctgagactcactgagttgctggaacgaggggagaggctgccacggcccgacaaatgtccctgtgaggtctatcatctcatgaagaactgctgggagacagaggcgtcctttcgcccaaccttcgagaacctcatacccattctgaagacagtccatgagaagtaccaaggccaggccccttcagtgttcagcgtgtgctga

SEQ ID NO: 523 - DNA, 3564 bp, Homo sapiens
atgcctctgcgccactgggggatggccaggggcagtaagcccgttggggatggagcccagcccatggctgccatgggaggcctgaaggtgcttctgcactgggctggtccaggcggcggggagccctgggtcactttcagtgagtcatcgctgacagctgaggaagtctgcatccacattgcacataaagttggtatcactcctccttgcttcaatctctttgccctcttcgatgctcaggcccaagtctggttgcccccaaaccacatcctagagatccccagagatgcaagcctgatgctatatttccgcataaggttttatttccggaactggcatggcatgaatcctcgggaaccggctgtgtaccgttgtgggcccccaggaaccgaggcatcctcagatcagacagcacaggggatgcaactcctggacccagcctcatttgagtacctctttgagcagggcaagcatgagtttgtgaatgacgtggcatcactgtgggagctgtcgaccgaggaggagatccaccactttaagaatgagagcctgggcatggcctttctgcacctctgtcacctcgctctccgccatggcatccccctggaggaggtggccaagaagaccagcttcaaggactgcatcccgcgctccttccgccggcatatccggcagcacagcgccctgacccggctgcgccttcggaacgtcttccgcaggttcctgcgggacttccagccgggccgactctcccagcagatggtcatggtcaaatacctagccacactcgagcggctggcaccccgcttcggcacagagcgtgtgcccgtgtgccacctgaggctgctggcccaggccgagggggagccctgctacatccgggacagtggggtggcccctacagaccctggccctgagtctgctgctgggcccccaacccacgaggtgctggtgacaggcactggtggcatccagtggtggccagtagaggaggaggtgaacaaggaggagggttctagtggcagcagtggcaggaacccccaagccagcctgtttgggaagaaggccaaggctcacaaggcagtcggccagccggcagacaggccgcgggagccactgtgggcctacttctgtgacttccgggacatcacccacgtggtgctgaaagagcactgtgtcagcatccaccggcaggacaacaagtgcctggagctgagcttgccttcccgggctgcggcgctgtccttcgtgtcgctggtggacggctatttccgcctgacggccgactccagccactacctgtgccacgaggtggctcccccacggctggtgatgagcatccgggatgggatccacggacccctgctggagccatttgtgcaggccaagctgcggcccgaggacggcctgtacctcattcactggagcaccagccacccctaccgcctgatcctcacagtggcccagcgtagccaggcaccagacggcatgcagagcttgcggctccgaaagttccccattgagcagcaggacggggccttcgtgctggagggctggggccggtccttccccagcgttcgggaacttggggctgccttgcagggctgcttgctgagggccggggatgactgcttctctctgcgtcgctgttgcctgccccaaccaggagaaacctccaatctcatcatcatgcggggggctcgggccagccccaggacactcaacctcagccagctcagcttccaccgggttgaccagaaggagatcacccagctgtcccacttgggccagggcacaaggaccaacgtgtatgagggccgcctgcgagtggagggcagcggggaccctgaggagggcaagatggatgacgaggaccccctcgtgcctggcagggaccgtgggcaggagctacgagtggtgctcaaagtgctggaccctagtcaccatgacatcgccctggccttctacgagacagccagcctcatgagccaggtctcccacacgcacctggccttcgtgcatggcgtctgtgtgcgcggccctgaaaatatcatggtgacagagtacgtggagcacggacccctggatgtgtggctgcggagggagcggggccatgtgcccatggcttggaagatggtggtggcccagcagctggccagcgccctcagctacctggagaacaagaacctggttcatggtaatgtgtgtggccggaacatcctgctggcccggctggggttggcagagggcaccagccccttcatcaagctgagtgatcctggcgtgggcctgggcgccctctccagggaggagcgggtggagaggatcccctggctggcccccgaatgcctaccaggtggggccaacagcctaagcaccgccatggacaagtgggggtttggcgccaccctcctggagatctgctttgacggagaggcccctctgcagagccgcagtccctccgagaaggagcatttctaccagaggcagcaccggctgcccgagccctcctgcccacagctggccacactcaccagccagtgtctgacctatgagccaacccagaggccatcattccgcaccatcctgcgtgacctcacccggctgcagccccacaatcttgctgacgtcttgactgtgaacccggactcaccggcgtcggaccctacggttttccacaagcgctatttgaaaaagatccgagatctgggcgagggtcacttcggcaaggtcagcttgtactgctacgatccgaccaacgacggcactggcgagatggtggcggtgaaagccctcaaggcagactgcggcccccagcaccgctcgggctggaagcaggagattgacattctgcgcacgctctaccacgagcacatcatcaagtacaagggctgctgcgaggaccaaggcgagaagtcgctgcagctggtcatggagtacgtgcccctgggcagcctccgagactacctgccccggcacagcatcgggctggcccagctgctgctcttcgcccagcagatctgcgagggcatggcctatctgcactcgcagcactacatccaccgagacctagccgcgcgcaacgtgctgctggacaacgacaggctggtcaagatcggggactttggcctagccaaggccgtgcccgaaggccacgagtactaccgcgtgcgcgaggatggggacagccccgtgttctggtatgccccagagtgcctgaaggagtataagttctactatgcgtcagatgtctggtccttcggggtgaccctgtatgagctgctgacgcactgtgactccagccagagcgcccccacgaaattccttgagctcataggcattgctcagggtcagatgacagttctgagactcactgagttgctggaacgaggggagaggctgccacggcccgacaaatgtccctgtgaggtctatcatctcatgaagaactgctgggagacagaggcgtcctttcgcccaaccttcgagaacctcatacccattctgaagacagtccatgagaagtaccaaggccaggccccttcagtgttcagcgtgtgctga

SEQ ID NO: 524 - DNA, 2673 bp, Homo sapiens
atggcgctgaggcggagcatggggcggccggggctcccgccgctgccgctgccgccgccaccgcggctcgggctgctgctggcggctctggcttctctgctgctcccggagtccgccgccgcaggtctgaagctcatgggagccccggtgaagctgacagtgtctcaggggcagccggtgaagctcaactgcagtgtggaggggatggaggagcctgacatccagtgggtgaaggatggggctgtggtccagaacttggaccagttgtacatcccagtcagcgagcagcactggatcggcttcctcagcctgaagtcagtggagcgctctgacgccggccggtactggtgccaggtggaggatgggggtgaaaccgagatctcccagccagtgtggctcacggtagaaggtgtgccatttttcacagtggagccaaaagatctggcagtgccacccaatgcccctttccaactgtcttgtgaggctgtgggtccccctgaacctgttaccattgtctggtggagaggaactacgaagatcgggggacccgctccctctccatctgttttaaatgtaacaggggtgacccagagcaccatgttttcctgtgaagctcacaacctaaaaggcctggcctcttctcgcacagccactgttcaccttcaagcactgcctgcagcccccttcaacatcaccgtgacaaagctttccagcagcaacgctagtgtggcctggatgccaggtgctgatggccgagctctgctacagtcctgtacagttcaggtgacacaggccccaggaggctgggaagtcctggctgttgtggtccctgtgcccccctttacctgcctgctccgggacctggtgcctgccaccaactacagcctcagggtgcgctgtgccaatgccttggggccctctccctatgctgactgggtgccctttcagaccaagggtctagccccagcctgcgctccccaaaacctccatgccatccgcacagattcaggcctcatcttggagtgggaagaagtgatccccgaggcccctttggaaggccccctgggaccctacaaactgtcctgggttcaagacaatggaacccaggatgagctgacagtggaggggaccagggccaatttgacaggctgggatccccaaaaggacctgatcgtacgtgtgtgcgtctccaatgcagttggctgtggaccctggagtcagccactggtggtctcttctcatgaccgtgcaggccagcagggccctcctcacagccgcacatcctgggtacctgtggtccttggtgtgctaacggccctggtgacggctgctgccctggccctcatcctgcttcgaaagagacggaaagagacgcggtttgggcaagcctttgacagtgtcatggcccggggagagccagccgttcacttccgggcagcccggtccttcaatcgagaaaggcccgagcgcatcgaggccacattggacagcttgggcatcagcgatgaactaaaggaaaaactggaggatgtgctcatcccagagcagcagttcaccctgggccggatgttgggcaaaggagagtttggttcagtgcgggaggcccagctgaagcaagaggatggctcctttgtgaaagtggctgtgaagatgctgaaagctgacatcattgcctcaagcgacattgaagagttcctcagggaagcagcttgcatgaaggagtttgaccatccacacgtggccaaacttgttggggtaagcctccggagcagggctaaaggccgtctccccatccccatggtcatcttgcccttcatgaagcatggggacctgcatgccttcctgctcgcctcccggattggggagaacccctttaacctacccctccagaccctgatccggttcatggtggacattgcctgcggcatggagtacctgagctctcggaacttcatccaccgagacctggctgctcggaattgcatgctggcagaggacatgacagtgtgtgtggctgacttcggactctcccggaagatctacagtggggactactatcgtcaaggctgtgcctccaaactgcctgtcaagtggctggccctggagagcctggccgacaacctgtatactgtgcagagtgacgtgtgggcgttcggggtgaccatgtgggagatcatgacacgtgggcagacgccatatgctggcatcgaaaacgctgagatttacaactacctcattggcgggaaccgcctgaaacagcctccggagtgtatggaggacgtgtatgatctcatgtaccagtgctggagtgctgaccccaagcagcgcccgagctttacttgtctgcgaatggaactggagaacatcttgggccagctgtctgtgctatctgccagccaggaccccttatacatcaacatcgagagagctgaggagcccactgcgggaggcagcctggagctacctggcagggatcagccctacagtggggctggggatggcagtggcatgggggcagtgggtggcactcccagtgactgtcggtacatactcacccccggagggctggctgagcagccagggcaggcagagcaccagccagagagtcccctcaatgagacacagaggcttttgctgctgcagcaagggctactgccacacagtagctgttag

SEQ ID NO: 525 - DNA, 2673 bp, Homo sapiens
atggcgctgaggcggagcatggggcggccggggctcccgccgctgccgctgccgccgccaccgcggctcgggctgctgctggcggctctggcttctctgctgctcccggagtccgccgccgcaggtctgaagctcatgggagccccggtgaagctgacagtgtctcaggggcagccggtgaagctcaactgcagtgtggaggggatggaggagcctgacatccagtgggtgaaggatggggctgtggtccagaacttggaccagttgtacatcccagtcagcgagcagcactggatcggcttcctcagcctgaagtcagtggagcgctctgacgccggccggtactggtgccaggtggaggatgggggtgaaaccgagatctcccagccagtgtggctcacggtagaaggtgtgccatttttcacagtggagccaaaagatctggcagtgccacccaatgcccctttccaactgtcttgtgaggctgtgggtccccctgaacctgttaccattgtctggtggagaggaactacgaagatcgggggacccgctccctctccatctgttttaaatgtaacaggggtgacccagagcaccatgttttcctgtgaagctcacaacctaaaaggcctggcctcttctcgcacagccactgttcaccttcaagcactgcctgcagcccccttcaacatcaccgtgacaaagctttccagcagcaacgctagtgtggcctggatgccaggtgctgatggccgagctctgctacagtcctgtacagttcaggtgacacaggccccaggaggctgggaagtcctggctgttgtggtccctgtgcccccctttacctgcctgctccgggacctggtgcctgccaccaactacagcctcagggtgcgctgtgccaatgccttggggccctctccctatgctgactgggtgccctttcagaccaagggtctagccccagccagcgctccccaaaacctccatgccatccgcacagattcaggcctcatcttggagtgggaagaagtgatccccgaggcccctttggaaggccccctgggaccctacaaactgtcctgggttcaagacaatggaacccaggatgagctgacagtggaggggaccagggccaatttgacaggctgggatccccaaaaggacctgatcgtacgtgtgtgcgtctccaatgcagttggctgtggaccctggagtcagccactggtggtctcttctcatgaccgtgcaggccagcagggccctcctcacagccgcacatcctgggtacctgtggtccttggtgtgctaacggccctggtgacggctgctgccctggccctcatcctgcttcgaaagagacggaaagagacgcggtttgggcaagcctttgacagtgtcatggcccggggagagccagccgttcacttccgggcagcccggtccttcaatcgagaaaggcccaagcgcatcgaggccacattggacagcttgggcatcagcgatgaactaaaggaaaaactggaggatgtgctcatcccagagcagcagttcaccctgggccggatgttgggcaaaggagagtttggttcagtgcgggaggcccagctgaagcaagaggatggctcctttgtgaaagtggctgtgaagatgctgaaagctgacatcattgcctcaagcgacattgaagagttcctcagggaagcagcttgcatgaaggagtttgaccatccacacgtggccaaacttgttggggtaagcctccggagcagggctaaaggccgtctccccatccccatggtcatcttgcccttcatgaagcatggggacctgcatgccttcctgctcgcctcccggattggggagaacccctttaacctacccctccagaccctgatccggttcatggtggacattgcctgcggcatggagtacctgagctctcggaacttcatccaccgagacctggctgctcggaattgcatgctggcagaggacatgacagtgtgtgtggctgacttcggactctcccggaagatctacagtggggactactatcgtcaaggctgtgcctccaaactgcctgtcaagtggctggccctggagagcctggccgacaacctgtatactgtgcagagtgacgtgtgggcgttcggggtgaccatgtgggagatcatgacacgtgggcagacgccatatgctggcatcgaaaacgctgagatttacaactacctcattggcgggaaccgcctgaaacagcctccggagtgtatggaggacgtgtatgatctcatgtaccagtgctggagtgctgaccccaagcagcgcccgagctttacttgtctgcgaatggaactggagaacatcttgggccagctgtctgtgctatctgccagccaggaccccttatacatcaacatcgagagagctgaggagcccactgcgggaggcagcctggagctacctggcagggatcagccctacagtggggctggggatggcagtggcatgggggcagtgggtggcactcccagtgactgtcggtacatactcacccccggagggctggctgagcagccagggcaggcagagcaccagccagagagtcccctcaatgagacacagaggcttttgctgctgcagcaagggctactgccacacagtagctgttag

SEQ ID NO: 526 - DNA, 2673 bp, Homo sapiens
atggcgctgaggcggagcatggggcggccggggctcccgccgctgccgctgccgccgccaccgcggctcgggctgctgctggcggctctggcttctctgctgctcccggagtccgccgccgcaggtctgaagctcatgggagccccggtgaagctgacagtgtctcaggggcagccggtgaagctcaactgcagtgtggaggggatggaggagcctgacatccagtgggtgaaggatggggctgtggtccagaacttggaccagttgtacatcccagtcagcgagcagcactggatcggcttcctcagcctgaagtcagtggagcgctctgacgccggccggtactggtgccaggtggaggatgggggtgaaaccgagatctcccagccagtgtggctcacggtagaaggtgtgccatttttcacagtggagccaaaagatctggcagtgccacccaatgcccctttccaactgtcttgtgaggctgtgggtccccctgaacctgttaccattgtctggtggagaggaactacgaagatcgggggacccgctccctctccatctgttttaaatgtaacaggggtgacccagagcaccatgttttcctgtgaagctcacaacctaaaaggcctggcctcttctcgcacagccactgttcaccttcaagcactgcctgcagcccccttcaacatcaccgtgacaaagctttccagcagcaacgctagtgtggcctggatgccaggtgctgatggccgagctctgctacagtcctgtacagttcaggtgacacaggccccaggaggctgggaagtcctggctgttgtggtccctgtgcccccctttacctgcctgctccgggacctggtgcctgccaccaactacagcctcagggtgcgctgtgccaatgccttggggccctctccctatgctgactgggtgccctttcagaccaagggtctagccccagccagcgctccccaaaacctccatgccatccgcacagattcaggcctcatcttggagtgggaagaagtgatccccgaggcccctttggaaggccccctgggaccctacaaactgtcctgggttcaagacaatggaacccaggatgagctgacagtggaggggaccagggccaatttgacaggctgggatccccaaaaggacctgatcgtacgtgtgtgcgtctccaatgcagttggctgtggaccctggagtcagccactggtggtctcttctcatgaccgtgcaggccagcagggccctcctcacagccgcacatcctgggtacctgtggtccttggtgtgctaacggccctggtgacggctgctgccctggccctcatcctgcttcgaaagagacggaaagagacgcggtttgggcaagcctttgacagtgtcatggcccggggagagccagccgttcacttccgggcagcccggtccttcaatcgagaaaggcccgagcgcatcgaggccacattggacagcttgggcatcagcgatgaactaaaggaaaaactggaggatgtgctcatcccagagcagcagttcaccctgggccggatgttgggcaaaggagagtttggtttagtgcgggaggcccagctgaagcaagaggatggctcctttgtgaaagtggctgtgaagatgctgaaagctgacatcattgcctcaagcgacattgaagagttcctcagggaagcagcttgcatgaaggagtttgaccatccacacgtggccaaacttgttggggtaagcctccggagcagggctaaaggccgtctccccatccccatggtcatcttgcccttcatgaagcatggggacctgcatgccttcctgctcgcctcccggattggggagaacccctttaacctacccctccagaccctgatccggttcatggtggacattgcctgcggcatggagtacctgagctctcggaacttcatccaccgagacctggctgctcggaattgcatgctggcagaggacatgacagtgtgtgtggctgacttcggactctcccggaagatctacagtggggactactatcgtcaaggctgtgcctccaaactgcctgtcaagtggctggccctggagagcctggccgacaacctgtatactgtgcagagtgacgtgtgggcgttcggggtgaccatgtgggagatcatgacacgtgggcagacgccatatgctggcatcgaaaacgctgagatttacaactacctcattggcgggaaccgcctgaaacagcctccggagtgtatggaggacgtgtatgatctcatgtaccagtgctggagtgctgaccccaagcagcgcccgagctttacttgtctgcgaatggaactggagaacatcttgggccagctgtctgtgctatctgccagccaggaccccttatacatcaacatcgagagagctgaggagcccactgcgggaggcagcctggagctacctggcagggatcagccctacagtggggctggggatggcagtggcatgggggcagtgggtggcactcccagtgactgtcggtacatactcacccccggagggctggctgagcagccagggcaggcagagcaccagccagagagtcccctcaatgagacacagaggcttttgctgctgcagcaagggctactgccacacagtagctgttag

SEQ ID NO: 527 - DNA, 2673 bp, Homo sapiens
atggcgctgaggcggagcatggggcggccggggctcccgccgctgccgctgccgccgccaccgcggctcgggctgctgctggcggctctggcttctctgctgctcccggagtccgccgccgcaggtctgaagctcatgggagccccggtgaagctgacagtgtctcaggggcagccggtgaagctcaactgcagtgtggaggggatggaggagcctgacatccagtgggtgaaggatggggctgtggtccagaacttggaccagttgtacatcccagtcagcgagcagcactggatcggcttcctcagcctgaagtcagtggagcgctctgacgccggccggtactggtgccaggtggaggatgggggtgaaaccgagatctcccagccagtgtggctcacggtagaaggtgtgccatttttcacagtggagccaaaagatctggcagtgccacccaatgcccctttccaactgtcttgtgaggctgtgggtccccctgaacctgttaccattgtctggtggagaggaactacgaagatcgggggacccgctccctctccatctgttttaaatgtaacaggggtgacccagagcaccatgttttcctgtgaagctcacaacctaaaaggcctggcctcttctcgcacagccactgttcaccttcaagcactgcctgcagcccccttcaacatcaccgtgacaaagctttccagcagcaacgctagtgtggcctggatgccaggtgctgatggccgagctctgctacagtcctgtacagttcaggtgacacaggccccaggaggctgggaagtcctggctgttgtggtccctgtgcccccctttacctgcctgctccgggacctggtgcctgccaccaactacagcctcagggtgcgctgtgccaatgccttggggccctctccctatgctgactgggtgccctttcagaccaagggtctagccccagccagcgctccccaaaacctccatgccatccgcacagattcaggcctcatcttggagtgggaagaagtgatccccgaggcccctttggaaggccccctgggaccctacaaactgtcctgggttcaagacaatggaacccaggatgagctgacagtggaggggaccagggccaatttgacaggctgggatccccaaaaggacctgatcgtacgtgtgtgcgtctccaatgcagttggctgtggaccctggagtcagccactggtggtctcttctcatgaccgtgcaggccagcagggccctcctcacagccgcacatcctgggtacctgtggtccttggtgtgctaacggccctggtgacggctgctgccctggccctcatcctgcttcgaaagagacggaaagagacgcggtttgggcaagcctttgacagtgtcatggcccggggagagccagccgttcacttccgggcagcccggtccttcaatcgagaaaggcccgagcgcatcgaggccacattggacagcttgggcatcagcgatgaactaaaggaaaaactggaggatgtgctcatcccagagcagcagttcaccctgggccggatgttgggcaaaggagagtttggttcagtgcgggaggcccagctgaagcaagaggatggctcctttgtgaaagtggctgtgaagatgctgaaagctgacatcattgcctcaagcgacattgaagagttcctcagggaagcagcttgcatgaaggagtttgaccatccacacgtggccaaacttgttggggtaagcctccggagcagggctaaaggccgtctccccatccccatggtcatcttgcccttcatgaagcatggggacctgcatgccttcctgctcgcctcccggattggggagaacccctttaacctacccctccagaccctgatccggttcatggtggacattgcctgcggcatggagtacctgagctctcggaacttcatccaccgagacctggctgctcggaattgcatgctggcagaggacatgacagtgtgtgtggctgacttcggactctcccggaagatctacagtggggactactatcgtcaaggctgtgcctccaaactgcctgtcaagtggctggccctggagagcctggccgacaacctgtatactgtgcagagtgacgtgtgggcgttcggggtgaccatgtgggagatcatgacacgtgggcagacgccatatgctggcatcgaaaacgctgagatttacaactacctcattggcgggaaccgcctgaaacagcctccggagtgtatggaggacgtgtatgatctcatgtaccagtgctggagtgctgaccccaagcagcgcccgagctttacttgtctgcgaatggaactggagaccatcttgggccagctgtctgtgctatctgccagccaggaccccttatacatcaacatcgagagagctgaggagcccactgcgggaggcagcctggagctacctggcagggatcagccctacagtggggctggggatggcagtggcatgggggcagtgggtggcactcccagtgactgtcggtacatactcacccccggagggctggctgagcagccagggcaggcagagcaccagccagagagtcccctcaatgagacacagaggcttttgctgctgcagcaagggctactgccacacagtagctgttag

SEQ ID NO: 528 - DNA, 2673 bp, Homo sapiens
atggcgctgaggcggagcatggggcggccggggctcccgccgctgccgctgccgccgccaccgcggctcgggctgctgctggcggctctggcttctctgctgctcccggagtccgccgccgcaggtctgaagctcatgggagccccggtgaagctgacagtgtctcaggggcagccggtgaagctcaactgcagtgtggaggggatggaggagcctgacatccagtgggtgaaggatggggctgtggtccagaacttggaccagttgtacatcccagtcagcgagcagcactggatcggcttcctcagcctgaagtcagtggagcgctctgacgccggccggtactggtgccaggtggaggatgggggtgaaaccgagatctcccagccagtgtggctcacggtagaaggtgtgccatttttcacagtggagccaaaagatctggcagtgccacccaatgcccctttccaactgtcttgtgaggctgtgggtccccctgaacctgttaccattgtctggtggagaggaactacgaagatcgggggacccgctccctctccatctgttttaaatgtaacaggggtgacccagagcaccatgttttcctgtgaagctcacaacctaaaaggcctggcctcttctcgcacagccactgttcaccttcaagcactgcctgcagcccccttcaacatcaccgtgacaaagctttccagcagcaacgctagtgtggcctggatgccaggtgctgatggccgagctctgctacagtcctgtacagttcaggtgacacaggccccaggaggctgggaagtcctggctgttgtggtccctgtgcccccctttacctgcctgctccgggacctggtgcctgccaccaactacagcctcagggtgcgctgtgccaatgccttggggccctctccctatgctgactgggtgccctttcagaccaagggtctagccccagccagcgctccccaaaacctccatgccatccgcacagattcaggcctcatcttggagtgggaagaagtgatccccgaggcccctttggaaggccccctgggaccctacaaactgtcctgggttcaagacaatggaacccaggatgagctgacagtggaggggaccagggccaatttgacaggctgggatccccaaaaggacctgatcgtacgtgtgtgcgtctccaatgcagttggctgtggaccctggagtcagccactggtggtctcttctcatgaccgtgcaggccagcagggccctcctcacagccgcacatcctgggtacctgtggtccttggtgtgctaacggccctggtgacggctgctgccctggccctcatcctgcttcgaaagagacggaaagagacgcggtttgggcaagcctttgacagtgtcatggcccggggagagccagccgttcacttccgggcagcccggtccttcaatcgagaaaggcccgagcgcatcgaggccacattggacagcttgggcatcagcgatgaactaaaggaaaaactggaggatgtgctcatcccagagcagcagttcaccctgggccggatgttgggcaaaggagagtttggttcagtgcgggaggcccagctgaagcaagaggatggctcctttgtgaaagtggctgtgaagatgctgaaagctgacatcattgcctcaagcgacattgaagagttcctcagggaagcagcttgcatgaaggagtttgaccatccacacgtggccaaacttgttggggtaagcctccggagcagggctaaaggccgtctccccatccccatggtcatcttgcccttcatgaagcatggggacctgcatgccttcctgctcgcctcccggattggggagaacccctttaacctacccctccagaccctgatccggttcatggtggacattgcctgcggcatggagtacctgagctctcggaacttcatccaccgagacctggctgctcggaattgcatgctggcagaggacatgacagtgtgtgtggctgacttcggactctcccggaagatctacagtggggactactatcgtcaaggctgtgcctccaaactgcctgtcaagtggctggccctggagagcctggccgacaacctgtatactgtgcagagtgacgtgtgggcgttcggggtgaccatgtgggagatcatgacacgtgggcagacgccatatgctggcatcgaaaacgctgagatttacaactacctcattggcgggaaccgcctgaaacagcctccggagtgtatggaggacgtgtatgatctcatgtaccagtgctggagtgctgaccccaagcagcgcccgagctttacttgtctgcgaatggaactggagaacatcttgggccagctgtctgtgctatctgccagccaggaccccttatacatcaacatcgagagagctgaggagcccactgcgggaggcagcctggagctacttggcagggatcagccctacagtggggctggggatggcagtggcatgggggcagtgggtggcactcccagtgactgtcggtacatactcacccccggagggctggctgagcagccagggcaggcagagcaccagccagagagtcccctcaatgagacacagaggcttttgctgctgcagcaagggctactgccacacagtagctgttag

SEQ ID NO: 529 - DNA, 4017 bp, Homo sapiens
atggtcagctactgggacaccggggtcctgctgtgcgcgctgctcagctgtctgcttctcacaggatctagttcaggttcaaaattaaaagatcctgaactgagtttaaaaggcacccagcacatcatgcaagcaggccagacactgcatctccaatgcaggggggaagcagcccataaatggtctttgcctgaaatggtgagtaaggaaagcgaaaggctgagcataactaaatctgcctgtggaagaaatggcaaacaattctgcagtactttaaccttgaacacagctcaagcaaaccacactggcttctacagctgcaaatatctagctgtacctacttcaaagaagaaggaaacagaatctgcaatctatatatttattagtgatacaggtagacctttcgtagagatgtacagtgaaatccccgaaattatacacatgactgaaggaagggagctcgtcattccctgccgggttacgtcacctaacatcactgttactttaaaaaagtttccacttgacactttgatccctgatggaaaacgcataatctgggacagtagaaagggcttcatcatatcaaatgcaacgtacaaagaaatatggcttctgacctgtgaagcaacagtcaatgggcatttgtataagacaaactatctcacacatcgacaaaccaatacaatcatagatgtccaaataagcacaccacgcccagtcaaattacttagaggccatactcttgtcctcaattgtactgctaccactcccttgaacacgagagttcaaatgacctggagttaccctgatgaaaaaaataagagagcttccgtaaggcgacgaattgaccaaagcaattcccatgccaacatattctacagtgttcttactattgacaaaatgcagaacaaagacaaaggactttatacttgtcgtgtaaggagtggaccatcattcaaatctgttaacacctcagtgcatatatatgataaagcattcatcactgtgaaacatcgaaaacagcaggtgcttgaaaccgtagctggcaagcggtcttaccggctctctatgaaagtgaaggcatttccctcgccggaagttgtatggttaaaagatgggttacctgcgactgagaaatctgctcgctatttgactcgtggctactcgttaattatcaaggacgtaactgaagaggatgcagggaattatacaatcttgctgagcataaaacagtcaaatgtgtttaaaaacctcactgccactctaattgtcaatgtgaaaccccagatttacgaaaaggccgtgtcatcgtttccagacccggctctctacccactgggcagcagacaaatcctgacttgtaccgcatatggtatccctcaacctacaatcaagtggttctggcacccctgtaaccataatcattccgaagcaaggtgtgacttttgttccaataatgaagagtcctttatcctggatgctgacagcaacatgggaaacagaattgagagcatcactcagcgcatggcaataatagaaggaaagaataagatggctagcaccttggttgtggctgactctagaatttctggaatctacatttgcatagcttccaataaagttgggactgtgggaagaaacataagcttttatatcacagatgtgccaaatgggtttcatgttaacttggaaaaaatgccgacggaaggagaggacctgaaactgtcttgcacagttaacaagttcttatacagagacgttacttggattttactgcggacagttaataacagaacaatgcactacagtattagcaagcaaaaaatggccatcactaaggagcactccatcactcttaatcttaccatcatgaatgtttccctgcaagattcaggcacctatgcctgcagagccaggaatgtatacacaggggaagaaatcctccagaagaaagaaattacaatcagagatcaggaagcaccatacctcctgcgaaacctcagtgatcacacagtggccatcagcagttccaccactttagactgtcatgctaatggtgtccccgagcctcagatcacttggtttaaaaacaaccacaaaatacaacaagagcctggaattattttaggaccaggaagcagcacgctgtttattgaaagagtcacagaagaggatgaaggtgtctatcactgcaaagccaccaaccagaagggctctgtggaaagttcagcatacctcactgttcaaggaacctcggacaagtctaatctggagctgatcactctaacatgcacctgtgtggctgcgactctcttctggctcctattaaccctccttatccgaaaaatgaaaaggtcttcttctgaaataaagactgactacctatcaattataatggacccagatgaagttcctttggatgagcagtgtgagcggctcccttatgatgccagcaagtgggagtttgcccgggagagacttaaactgggcaaatcacttggaagaggggcttttggaaaagtggttcaagcatcagcatttggcattaagaaatcacctacgtgccggactgtggctgtgaaaatgctgaaagagggggccacggccagcgagtacaaagctctgatgactgagctaaaaatcttgacccacattggccaccatctgaacgtggttaacctgctgggagcctgcaccaagcaaggagggcctctgatggtgattgttgaatactgcaaatatggaaatctctccaactacctcaagagcaaacgtgacttattttttctcaacaaggatgcagcactacacatggagcctaagaaagaaaaaatggagccaggcctggaacaaggcaagaaaccaagactagatagcgtcaccagcagcgaaagctttgcgagctccggctttcaggaagataaaagtctgagtgatgttgaggaagaggaggattctgacggtttctacaaggagcccatcactatggaagatctgatttcttacagttttcaagtggccagaggcatggagttcctgtcttccagaaagtgcattcatcgggacctggcagcgagaaacattcttttatctgagaacaacgtggtgaagatttgtgattttggccttgcccgggatatttataagaaccccgattatgtgagaaaaggagatactcgacttcctctgaaatggatggctcccgaatctatctttgacaaaatctacagcaccaagagcgacgtgtggtcttacggagtattgctgtgggaaatcttctccttaggtgggtctccatacccaggagtacaaatggatgaggacttttgcagtcgcctgagggaaggcatgaggatgagagctcctgagtactctactcctgaaatctatcagatcatgctggactgctggcacagagacccaaaagaaaggccaagatttgcagaacttgtggaaaaactaggtgatttgcttcaagcaaatgtacaacaggatggtaaagactacatcccaatcaatgccatactgacaggaaatagtgggtttacatactcaactcctgccttctctgaggacttcttcaaggaaagtatttcagctccgaagtttaattcaggaagctctgatgatgtcagatatgtaaatgctttcaagttcatgagcctggaaagaatcaaaacctttgaagaacttttaccgaatgccacctccatgtttgatgactaccagggcgacagcagcactctgttggcctctcccatgctgaagcgcttcacctggactgacagcaaacccaaggcctcgctcaagattgacttgagagtaaccagtaaaagtaaggagtcggggctgtctgatgtcagcaggcccagtttctgccattccagctgtgggcacgtcagcgaaggcaagcgcaggttcacctacgaccacgctgagctggaaaggaaaatcgcgtgctgctccccgcccccagactacaactcggtggtcctgtactccaccccacccatctag

SEQ ID NO: 530 - DNA, 4017 bp, Homo sapiens
atggtcagctactgggacaccggggtcctgctgtgcgcgctgctcagctgtctgcttctcacaggatctagttcaggttcaaaattaaaagatcctgaactgagtttaaaaggcacccagcacatcatgcaagcaggccagacactgcatctccaatgcaggggggaagcagcccataaatggtctttgcctgaaatggtgagtaaggaaagcgaaaggctgagcataactaaatctgcctgtggaagaaatggcaaacaattctgcagtactttaaccttgaacacagctcaagcaaaccacactggcttctacagctgcaaatatctagctgtacctacttcaaagaagaaggaaacagaatctgcaatctatatatttattagtgatacaggtagacctttcgtagagatgtacagtgaaatccccgaaattatacacatgactgaaggaagggagctcgtcattccctgccgggttacgtcacctaacatcactgttactttaaaaaagtttccacttgacactttgatccctgatggaaaacgcataatctgggacagtagaaagggcttcatcatatcaaatgcaacgtacaaagaaatagggcttctgacctgtgaagcaacagtcaatgggcatttgtataagacaaactatctcacacatcgacaaaccaatacaatcatagatgtccaaataagcacaccacgcccagtcaaattacttagaggccatactcttgtcctcaattgtactgctaccactcccttgaacacgagagttcaaatgacctggagttaccctgatgaaaaaaataagagagcttccgtaaggcgacgaattgaccaaagcaattcccatgccaacatattctacagtgttcttactattgacaaaatgcagaacaaagacaaaggactttatacttgtcgtgtaaggagtggaccatcattcaaatctgttaacacctcagtgcatatatatgataaagcattcatcactgtgaaacatcgaaaacagcaggtgcttgaaaccgtagctggcaagcggtcttaccggctctctatgaaagtgaaggcatttccctcgccggaagttgtatggttaaaagatgggttacctgcgactgagaaatctgctcgctatttgactcgtggctactcgttaattatcaaggacgtaactgaagaggatgcagggaattatacaatcttgctgagcataaaacagtcaaatgtgtttaaaaacctcactgccactctaattgtcaatgtgaaaccccagatttacgaaaaggccgtgtcattgtttccagacccggctctctacccactgggcagcagacaaatcctgacttgtaccgcatatggtatccctcaacctacaatcaagtggttctggcacccctgtaaccataatcattccgaagcaaggtgtgacttttgttccaataatgaagagtcctttatcctggatgctgacagcaacatgggaaacagaattgagagcatcactcagcgcatggcaataatagaaggaaagaataagatggctagcaccttggttgtggctgactctagaatttctggaatctacatttgcatagcttccaataaagttgggactgtgggaagaaacataagcttttatatcacagatgtgccaaatgggtttcatgttaacttggaaaaaatgccgacggaaggagaggacctgaaactgtcttgcacagttaacaagttcttatacagagacgttacttggattttactgcggacagttaataacagaacaatgcactacagtattagcaagcaaaaaatggccatcactaaggagcactccatcactcttaatcttaccatcatgaatgtttccctgcaagattcaggcacctatgcctgcagagccaggaatgtatacacaggggaagaaatcctccagaagaaagaaattacaatcagagatcaggaagcaccatacctcctgcgaaacctcagtgatcacacagtggccatcagcagttccaccactttagactgtcatgctaatggtgtccccgagcctcagatcacttggtttaaaaacaaccacaaaatacaacaagagcctggaattattttaggaccaggaagcagcacgctgtttattgaaagagtcacagaagaggatgaaggtgtctatcactgcaaagccaccaaccagaagggctctgtggaaagttcagcatacctcactgttcaaggaacctcggacaagtctaatctggagctgatcactctaacatgcacctgtgtggctgcgactctcttctggctcctattaaccctccttatccgaaaaatgaaaaggtcttcttctgaaataaagactgactacctatcaattataatggacccagatgaagttcctttggatgagcagtgtgagcggctcccttatgatgccagcaagtgggagtttgcccgggagagacttaaactgggcaaatcacttggaagaggggcttttggaaaagtggttcaagcatcagcatttggcattaagaaatcacctacgtgccggactgtggctgtgaaaatgctgaaagagggggccacggccagcgagtacaaagctctgatgactgagctaaaaatcttgacccacattggccaccatctgaacgtggttaacctgctgggagcctgcaccaagcaaggagggcctctgatggtgattgttgaatactgcaaatatggaaatctctccaactacctcaagagcaaacgtgacttattttttctcaacaaggatgcagcactacacatggagcctaagaaagaaaaaatggagccaggcctggaacaaggcaagaaaccaagactagatagcgtcaccagcagcgaaagctttgcgagctccggctttcaggaagataaaagtctgagtgatgttgaggaagaggaggattctgacggtttctacaaggagcccatcactatggaagatctgatttcttacagttttcaagtggccagaggcatggagttcctgtcttccagaaagtgcattcatcgggacctggcagcgagaaacattcttttatctgagaacaacgtggtgaagatttgtgattttggccttgcccgggatatttataagaaccccgattatgtgagaaaaggagatactcgacttcctctgaaatggatggctcccgaatctatctttgacaaaatctacagcaccaagagcgacgtgtggtcttacggagtattgctgtgggaaatcttctccttaggtgggtctccatacccaggagtacaaatggatgaggacttttgcagtcgcctgagggaaggcatgaggatgagagctcctgagtactctactcctgaaatctatcagatcatgctggactgctggcacagagacccaaaagaaaggccaagatttgcagaacttgtggaaaaactaggtgatttgcttcaagcaaatgtacaacaggatggtaaagactacatcccaatcaatgccatactgacaggaaatagtgggtttacatactcaactcctgccttctctgaggacttcttcaaggaaagtatttcagctccgaagtttaattcaggaagctctgatgatgtcagatatgtaaatgctttcaagttcatgagcctggaaagaatcaaaacctttgaagaacttttaccgaatgccacctccatgtttgatgactaccagggcgacagcagcactctgttggcctctcccatgctgaagcgcttcacctggactgacagcaaacccaaggcctcgctcaagattgacttgagagtaaccagtaaaagtaaggagtcggggctgtctgatgtcagcaggcccagtttctgccattccagctgtgggcacgtcagcgaaggcaagcgcaggttcacctacgaccacgctgagctggaaaggaaaatcgcgtgctgctccccgcccccagactacaactcggtggtcctgtactccaccccacccatctag

SEQ ID NO: 531 - DNA, 4017 bp, Homo sapiens
atggtcagctactgggacaccggggtcctgctgtgcgcgctgctcagctgtctgcttctcacaggatctagttcaggttcaaaattaaaagatcctgaactgagtttaaaaggcacccagcacatcatgcaagcaggccagacactgcatctccaatgcaggggggaagcagcccataaatggtctttgcctgaaatggtgagtaaggaaagcgaaaggctgagcataactaaatctgcctgtggaagaaatggcaaacaattctgcagtactttaaccttgaacacagctcaagcaaaccacactggcttctacagctgcaaatatctagctgtacctacttcaaagaagaaggaaacagaatctgcaatctatatatttattagtgatacaggtagacctttcgtagagatgtacagtgaaatccccgaaattatacacatgactgaaggaagggagctcgtcattccctgccgggttacgtcacctaacatcactgttactttaaaaaagtttccacttgacactttgatccctgatggaaaacgcataatctgggacagtagaaagggcttcatcatatcaaatgcaacgtacaaagaaatagggcttctgacctgtgaagcaacagtcaatgggcatttgtataagacaaactatctcacacatcgacaaaccaatacaatcatagatgtccaaataagcacaccacgcccagtcaaattacttagaggccatactcttgtcctcaattgtactgctaccactcccttgaacacgagagttcaaatgacctggagttaccctgatgaaaaaaataagagagcttccgtaaggcgacgaattgaccaaagcaattcccatgccaacatattctacagtgttcttactattgacaaaatgcagaacaaagacaaaggactttatacttgtcgtgtaaggagtggaccatcattcaaatctgttaacacctcagtgcatatatatgataaagcattcatcactgtgaaacatcgaaaacagcaggtgcttgaaaccgtagctggcaagcggtcttaccggctctctatgaaagtgaaggcatttccctcgccggaagttgtatggttaaaagatgggttacctgcgactgagaaatctgctcgctatttgactcgtggctactcgttaattatcaaggacgtaactgaagaggatgcagggaattatacaatcttgctgagcataaaacagtcaaatgtgtttaaaaacctcactgccactctaattgtcaatgtgaaaccccagatttacgaaaaggccgtgtcatcgtttccagacccggctctctacccactgggcagcagacaaatcctgacttgtaccgcatatggtatccctcaacctacaatcaagtggttctggcacccctgtaaccataatcattccgaagcaaggtgtgacttttgttccaataatgaagagtcctttatcctggatgctgacagcaacatgggaaacagaattgagagcatcactcagcgcatggcaataatagaaggaaagaataagatggctagcaccttggttgtggctgactctagaatttctggaatctacatttgcatagcttccaataaagttgggactgtgggaagaaacataagcttttatatcacagatgtgccaaatgggtttcatgttaacttggaaaaaatgccgacggaaggagaggacctgaaactgtcttgcacagttaacaagttcttatacagagacgttacttggattttactgcggacagttaataacagaacaatgcactacagtattagcaagcaaaaaatggccatcactaaggagcactccatcactcttaatcttaccatcatgaatgtttccctgcaagattcaggcacctatgcctgcagagccaggaatgtatacacaggggaagaaatcctccagaagaaagaaattacaatcagagatcaggaagcaccatacctcctgcgaaacctcagtgatcacacagtggccatcagcagttccaccactttagactgtcatgctaatggtgtccccgagcctcagatcacttggtttaaaaacaaccacaaaatacaacaagagcctggaattattttaggaccaggaagcagcacgctgtttattgaaagagtcacagaagaggatgaaggtgtctatcactgcaaagccaccaaccagaagggctctgtggaaagttcagcatacctcactgttcaaggaacctcggacaagtctaatctggagctgatcactctaacatgcacctgtgtggctgcgactctcttctggctcctattaaccctccttatccaaaaaatgaaaaggtcttcttctgaaataaagactgactacctatcaattataatggacccagatgaagttcctttggatgagcagtgtgagcggctcccttatgatgccagcaagtgggagtttgcccgggagagacttaaactgggcaaatcacttggaagaggggcttttggaaaagtggttcaagcatcagcatttggcattaagaaatcacctacgtgccggactgtggctgtgaaaatgctgaaagagggggccacggccagcgagtacaaagctctgatgactgagctaaaaatcttgacccacattggccaccatctgaacgtggttaacctgctgggagcctgcaccaagcaaggagggcctctgatggtgattgttgaatactgcaaatatggaaatctctccaactacctcaagagcaaacgtgacttattttttctcaacaaggatgcagcactacacatggagcctaagaaagaaaaaatggagccaggcctggaacaaggcaagaaaccaagactagatagcgtcaccagcagcgaaagctttgcgagctccggctttcaggaagataaaagtctgagtgatgttgaggaagaggaggattctgacggtttctacaaggagcccatcactatggaagatctgatttcttacagttttcaagtggccagaggcatggagttcctgtcttccagaaagtgcattcatcgggacctggcagcgagaaacattcttttatctgagaacaacgtggtgaagatttgtgattttggccttgcccgggatatttataagaaccccgattatgtgagaaaaggagatactcgacttcctctgaaatggatggctcccgaatctatctttgacaaaatctacagcaccaagagcgacgtgtggtcttacggagtattgctgtgggaaatcttctccttaggtgggtctccatacccaggagtacaaatggatgaggacttttgcagtcgcctgagggaaggcatgaggatgagagctcctgagtactctactcctgaaatctatcagatcatgctggactgctggcacagagacccaaaagaaaggccaagatttgcagaacttgtggaaaaactaggtgatttgcttcaagcaaatgtacaacaggatggtaaagactacatcccaatcaatgccatactgacaggaaatagtgggtttacatactcaactcctgccttctctgaggacttcttcaaggaaagtatttcagctccgaagtttaattcaggaagctctgatgatgtcagatatgtaaatgctttcaagttcatgagcctggaaagaatcaaaacctttgaagaacttttaccgaatgccacctccatgtttgatgactaccagggcgacagcagcactctgttggcctctcccatgctgaagcgcttcacctggactgacagcaaacccaaggcctcgctcaagattgacttgagagtaaccagtaaaagtaaggagtcggggctgtctgatgtcagcaggcccagtttctgccattccagctgtgggcacgtcagcgaaggcaagcgcaggttcacctacgaccacgctgagctggaaaggaaaatcgcgtgctgctccccgcccccagactacaactcggtggtcctgtactccaccccacccatctag

SEQ ID NO: 532 - DNA, 4017 bp, Homo sapiens
atggtcagctactgggacaccggggtcctgctgtgcgcgctgctcagctgtctgcttctcacaggatctagttcaggttcaaaattaaaagatcctgaactgagtttaaaaggcacccagcacatcatgcaagcaggccagacactgcatctccaatgcaggggggaagcagcccataaatggtctttgcctgaaatggtgagtaaggaaagcgaaaggctgagcataactaaatctgcctgtggaagaaatggcaaacaattctgcagtactttaaccttgaacacagctcaagcaaaccacactggcttctacagctgcaaatatctagctgtacctacttcaaagaagaaggaaacagaatctgcaatctatatatttattagtgatacaggtagacctttcgtagagatgtacagtgaaatccccgaaattatacacatgactgaaggaagggagctcgtcattccctgccgggttacgtcacctaacatcactgttactttaaaaaagtttccacttgacactttgatccctgatggaaaacgcataatctgggacagtagaaagggcttcatcatatcaaatgcaacgtacaaagaaatagggcttctgacctgtgaagcaacagtcaatgggcatttgtataagacaaactatctcacacatcgacaaaccaatacaatcatagatgtccaaataagcacaccacgcccagtcaaattacttagaggccatactcttgtcctcaattgtactgctaccactcccttgaacacgagagttcaaatgacctggagttaccctgatgaaaaaaataagagagcttccgtaaggcgacgaattgaccaaagcaattcccatgccaacatattctacagtgttcttactattgacaaaatgcagaacaaagacaaaggactttatacttgtcgtgtaaggagtggaccatcattcaaatctgttaacacctcagtgcatatatatgataaagcattcatcactgtgaaacatcgaaaacagcaggtgcttgaaaccgtagctggcaagcggtcttaccggctctctatgaaagtgaaggcatttccctcgccggaagttgtatggttaaaagatgggttacctgcgactgagaaatctgctcgctatttgactcgtggctactcgttaattatcaaggacgtaactgaagaggatgcagggaattatacaatcttgctgagcataaaacagtcaaatgtgtttaaaaacctcactgccactctaattgtcaatgtgaaaccccagatttacgaaaaggccgtgtcatcgtttccagacccggctctctacccactgggcagcagacaaatcctgacttgtaccgcatatggtatccctcaacctacaatcaagtggttctggcacccctgtaaccataatcattccgaagcaaggtgtgacttttgttccaataatgaagagtcctttatcctggatgctgacagcaacatgggaaacagaattgagagcatcactcagcgcatggcaataatagaaggaaagaataagatggctagcaccttggttgtggctgactctagaatttctggaatctacatttgcatagcttccaataaagttgggactgtgggaagaaacataagcttttatatcacagatgtgccaaatgggtttcatgttaacttggaaaaaatgccgacggaaggagaggacctgaaactgtcttgcacagttaacaagttcttatacagagacgttacttggattttactgcggacagttaataacagaacaatgcactacagtattagcaagcaaaaaatggccatcactaaggagcactccatcactcttaatcttaccatcatgaatgtttccctgcaagattcaggcacctatgcctgcagagccaggaatgtatacacaggggaagaaatcctccagaagaaagaaattacaatcagagatcaggaagcaccatacctcctgcgaaacctcagtgatcacacagtggccatcagcagttccaccactttagactgtcatgctaatggtgtccccgagcctcagatcacttggtttaaaaacaaccacaaaatacaacaagagcctggaattattttaggaccaggaagcagcacgctgtttattgaaagagtcacagaagaggatgaaggtgtctatcactgcaaagccaccaaccagaagggctctgtggaaagttcagcatacctcactgttcaaggaacctcggacaagtctaatctggagctgatcactctaacatgcacctgtgtggctgcgactctcttctggctcctattaaccctccttatccgaaaaatgaaaaggtcttcttctgaaataaagactgactacctatcaattataatggacccagatgaagttcctttggatgagcagtgtgagcggctcccttatgatgccagcaagtgggagtttgcccgggagagacttaaactgggcaaatcacttggaagaggggcttttggaaaagtggttcaagcatcagcatttggcattaagaaatcacctacgtgccggactgtggctgtgaaaatgctgaaagagggggccacggccagcgagtacaaagctctgatgactgagctaaaaatcttgacccacattggccaccatctgaacgtggttaacctgctgggagcctgcaccaagcaaggagggcctctgatggtgattgttgaatactgcaaatatggaaatctctccaactacctcaagagcaaacgtgacttattttttctcaacaaggatgcagcactacacgtggagcctaagaaagaaaaaatggagccaggcctggaacaaggcaagaaaccaagactagatagcgtcaccagcagcgaaagctttgcgagctccggctttcaggaagataaaagtctgagtgatgttgaggaagaggaggattctgacggtttctacaaggagcccatcactatggaagatctgatttcttacagttttcaagtggccagaggcatggagttcctgtcttccagaaagtgcattcatcgggacctggcagcgagaaacattcttttatctgagaacaacgtggtgaagatttgtgattttggccttgcccgggatatttataagaaccccgattatgtgagaaaaggagatactcgacttcctctgaaatggatggctcccgaatctatctttgacaaaatctacagcaccaagagcgacgtgtggtcttacggagtattgctgtgggaaatcttctccttaggtgggtctccatacccaggagtacaaatggatgaggacttttgcagtcgcctgagggaaggcatgaggatgagagctcctgagtactctactcctgaaatctatcagatcatgctggactgctggcacagagacccaaaagaaaggccaagatttgcagaacttgtggaaaaactaggtgatttgcttcaagcaaatgtacaacaggatggtaaagactacatcccaatcaatgccatactgacaggaaatagtgggtttacatactcaactcctgccttctctgaggacttcttcaaggaaagtatttcagctccgaagtttaattcaggaagctctgatgatgtcagatatgtaaatgctttcaagttcatgagcctggaaagaatcaaaacctttgaagaacttttaccgaatgccacctccatgtttgatgactaccagggcgacagcagcactctgttggcctctcccatgctgaagcgcttcacctggactgacagcaaacccaaggcctcgctcaagattgacttgagagtaaccagtaaaagtaaggagtcggggctgtctgatgtcagcaggcccagtttctgccattccagctgtgggcacgtcagcgaaggcaagcgcaggttcacctacgaccacgctgagctggaaaggaaaatcgcgtgctgctccccgcccccagactacaactcggtggtcctgtactccaccccacccatctag

SEQ ID NO: 533 - DNA, 4017 bp, Homo sapiens
atggtcagctactgggacaccggggtcctgctgtgcgcgctgctcagctgtctgcttctcacaggatctagttcaggttcaaaattaaaagatcctgaactgagtttaaaaggcacccagcacatcatgcaagcaggccagacactgcatctccaatgcaggggggaagcagcccataaatggtctttgcctgaaatggtgagtaaggaaagcgaaaggctgagcataactaaatctgcctgtggaagaaatggcaaacaattctgcagtactttaaccttgaacacagctcaagcaaaccacactggcttctacagctgcaaatatctagctgtacctacttcaaagaagaaggaaacagaatctgcaatctatatatttattagtgatacaggtagacctttcgtagagatgtacagtgaaatccccgaaattatacacatgactgaaggaagggagctcgtcattccctgccgggttacgtcacctaacatcactgttactttaaaaaagtttccacttgacactttgatccctgatggaaaacgcataatctgggacagtagaaagggcttcatcatatcaaatgcaacgtacaaagaaatagggcttctgacctgtgaagcaacagtcaatgggcatttgtataagacaaactatctcacacatcgacaaaccaatacaatcatagatgtccaaataagcacaccacgcccagtcaaattacttagaggccatactcttgtcctcaattgtactgctaccactcccttgaacacgagagttcaaatgacctggagttaccctgatgaaaaaaataagagagcttccgtaaggcgacgaattgaccaaagcaattcccatgccaacatattctacagtgttcttactattgacaaaatgcagaacaaagacaaaggactttatacttgtcgtgtaaggagtggaccatcattcaaatctgttaacacctcagtgcatatatatgataaagcattcatcactgtgaaacatcgaaaacagcaggtgcttgaaaccgtagctggcaagcggtcttaccggctctctatgaaagtgaaggcatttccctcgccggaagttgtatggttaaaagatgggttacctgcgactgagaaatctgctcgctatttgactcgtggctactcgttaattatcaaggacgtaactgaagaggatgcagggaattatacaatcttgctgagcataaaacagtcaaatgtgtttaaaaacctcactgccactctaattgtcaatgtgaaaccccagatttacgaaaaggccgtgtcatcgtttccagacccggctctctacccactgggcagcagacaaatcctgacttgtaccgcatatggtatccctcaacctacaatcaagtggttctggcacccctgtaaccataatcattccgaagcaaggtgtgacttttgttccaataatgaagagtcctttatcctggatgctgacagcaacatgggaaacagaattgagagcatcactcagcgcatggcaataatagaaggaaagaataagatggctagcaccttggttgtggctgactctagaatttctggaatctacatttgcatagcttccaataaagttgggactgtgggaagaaacataagcttttatatcacagatgtgccaaatgggtttcatgttaacttggaaaaaatgccgacggaaggagaggacctgaaactgtcttgcacagttaacaagttcttatacagagacgttacttggattttactgcggacagttaataacagaacaatgcactacagtattagcaagcaaaaaatggccatcactaaggagcactccatcactcttaatcttaccatcatgaatgtttccctgcaagattcaggcacctatgcctgcagagccaggaatgtatacacaggggaagaaatcctccagaagaaagaaattacaatcagagatcaggaagcaccatacctcctgcgaaacctcagtgatcacacagtggtcatcagcagttccaccactttagactgtcatgctaatggtgtccccgagcctcagatcacttggtttaaaaacaaccacaaaatacaacaagagcctggaattattttaggaccaggaagcagcacgctgtttattgaaagagtcacagaagaggatgaaggtgtctatcactgcaaagccaccaaccagaagggctctgtggaaagttcagcatacctcactgttcaaggaacctcggacaagtctaatctggagctgatcactctaacatgcacctgtgtggctgcgactctcttctggctcctattaaccctccttatccgaaaaatgaaaaggtcttcttctgaaataaagactgactacctatcaattataatggacccagatgaagttcctttggatgagcagtgtgagcggctcccttatgatgccagcaagtgggagtttgcccgggagagacttaaactgggcaaatcacttggaagaggggcttttggaaaagtggttcaagcatcagcatttggcattaagaaatcacctacgtgccggactgtggctgtgaaaatgctgaaagagggggccacggccagcgagtacaaagctctgatgactgagctaaaaatcttgacccacattggccaccatctgaacgtggttaacctgctgggagcctgcaccaagcaaggagggcctctgatggtgattgttgaatactgcaaatatggaaatctctccaactacctcaagagcaaacgtgacttattttttctcaacaaggatgcagcactacacatggagcctaagaaagaaaaaatggagccaggcctggaacaaggcaagaaaccaagactagatagcgtcaccagcagcgaaagctttgcgagctccggctttcaggaagataaaagtctgagtgatgttgaggaagaggaggattctgacggtttctacaaggagcccatcactatggaagatctgatttcttacagttttcaagtggccagaggcatggagttcctgtcttccagaaagtgcattcatcgggacctggcagcgagaaacattcttttatctgagaacaacgtggtgaagatttgtgattttggccttgcccgggatatttataagaaccccgattatgtgagaaaaggagatactcgacttcctctgaaatggatggctcccgaatctatctttgacaaaatctacagcaccaagagcgacgtgtggtcttacggagtattgctgtgggaaatcttctccttaggtgggtctccatacccaggagtacaaatggatgaggacttttgcagtcgcctgagggaaggcatgaggatgagagctcctgagtactctactcctgaaatctatcagatcatgctggactgctggcacagagacccaaaagaaaggccaagatttgcagaacttgtggaaaaactaggtgatttgcttcaagcaaatgtacaacaggatggtaaagactacatcccaatcaatgccatactgacaggaaatagtgggtttacatactcaactcctgccttctctgaggacttcttcaaggaaagtatttcagctccgaagtttaattcaggaagctctgatgatgtcagatatgtaaatgctttcaagttcatgagcctggaaagaatcaaaacctttgaagaacttttaccgaatgccacctccatgtttgatgactaccagggcgacagcagcactctgttggcctctcccatgctgaagcgcttcacctggactgacagcaaacccaaggcctcgctcaagattgacttgagagtaaccagtaaaagtaaggagtcggggctgtctgatgtcagcaggcccagtttctgccattccagctgtgggcacgtcagcgaaggcaagcgcaggttcacctacgaccacgctgagctggaaaggaaaatcgcgtgctgctccccgcccccagactacaactcggtggtcctgtactccaccccacccatctag

SEQ ID NO: 534 - DNA, 4071 bp, Homo sapiens
atgcagagcaaggtgctgctggccgtcgccctgtggctctgcgtggagacccgggccgcctctgtgggtttgcctagtgtttctcttgatctgcccaggctcagcatacaaaaagacatacttacaattaaggctaatacaactcttcaaattacttgcaggggacagagggacttggactggctttggcccaataatcagagtggcagtgagcaaagggtggaggtgactgagtgcagcgatggcctcttctgtaagacactcacaattccaaaagtgatcggaaatgacactggagcctacaagtgcttctaccggaaaactgacttggcctcggtcatttatgtctatgttcaagattacagatctccatttattgcttctgttagtgaccaacatggagtcgtgtacattactgagaacaaaaacaaaactgtggtgattccatgtctcgggtccatttcaaatctcaacgtgtcactttgtgcaagatacccagaaaagagatttgttcctgatggtaacagaatttcctgggacagcaagaagggctttactattcccagctacatgatcagctatgctggcatggtcttctgtgaagcaaaaattaatgatgaaagttaccagtctattatgtacatagttgtcgttgtagggtataggatttatgatgtggttctgagtccgtctcatggaattgaactatctgttggagaaaagcttgtcttaaattgtacagcaagaactgaactaaatgtggggattgacttcaactgggaatacccttcttcgaagcatcagcataagaaacttgtaaaccgagacctaaaaacccagtctgggagtgagatgaagaaatttttgagcaccttaactatagatggtgtaacccggagtgaccaaggattgtacacctgtgcagcatccagtgggctgatgaccaagaagaacagcacatttgtcagggtccatgaaaaaccttttgttgcttttggaagtggcatggaatctctggtggaagccacggtgggggagcgtgtcagaatccctgcgaagtaccttggttacccacccccagaaataaaatggtataaaaatggaataccccttgagtccaatcacacaattaaagcggggcatgtactgacgattatggaagtgagtgaaagagacacaggaaattacactgtcatccttaccaatcccatttcaaaggagaagcagagccatgtggtctctctggttgtgtatgtcccaccccagattggtgagaaatctctaatctctcctgtggattcctaccagtacggcaccactcaaacgctgacatgtacggtctatgccattcctcccccgcatcacatccactggtattggcagttggaggaagagtgcgccaacgagcccagccaagctgtctcagtgacaaacccatacccttgtgaagaatggagaagtgtggaggacttccagggaggaaataaaattgaagttaataaaaatcaatttgctctaattgaaggaaaaaacaaaactgtaagtacccttgttatccaagcggcaaatgtgtcagctttgtacaaatgtgaagcggtcaacaaagtcgggagaggagagagggtgatctccttccacgtgaccaggggtcctgaaattactttgcaacctgacatgcagcccactgagcaggagagcgtgtctttgtggtgcactgcagacagatctacgtttgagaacctcacatggtacaagcttggcccacagcctctgccaatccatgtgggagagttgcccacacctgtttgcaagaacttggatactctttggaaattgaatgccaccatgttctctaatagcacaaatgacattttgatcatggagcttaagaatgcatccttgcaggaccaaggagactatgtctgccttgctcaagacaggaagaccaagaaaagacattgcgtggtcaggcagctcacagtcctagagcgtgtggcacccacgatcacaggaaacctggagaatcagacgacaagtattggggaaagcatcgaagtctcatgcacggcatctgggaatccccctccacagatcatgtggtttaaagataatgagacccttgtagaagactcaggcattgtattgaaggatgggaaccggaacctcactatccgcagagtgaggaaggaggacgaaggcctctacacctgccaggcatgcagtgttcttggctgtgcaaaagtggaggcatttttcataatagaaggtgcccaggaaaagacgaacttggaaatcattattctagtaggcacggcggtgattgccatgttcttctggctacttcttgtcatcatcctacggaccgttaagcgggccaatggaggggaactgaagacaggctacttgtccatcgtcatggatccagatgaactcccattggatgaacattgtgaacgactgccttatgatgccagcaaatgggaattccccagagaccggctgaagctaggtaagcctcttggccgtggtgcctttggccaagtgattgaagcagatgcctttggaattgacaagacagcaacttgcaggacagtagcagtcaaaatgttgaaagaaggagcaacacacagtgagcatcgagctctcatgtctgaactcaagatcctcattcatattggtcaccatctcaatgtggtcaaccttctaggtgcctgtaccaagccaggagggccactcatggtgattgtggaattctgcaaatttggaaacctgtccacttacctgaggagcaagagaaatgaatttgtcccctacaagaccaaaggggcacgattccgtcaagggaaagactacgttggagcaatccctgtggatctgaaacggcgcttggacagcatcaccagtagccagagctcagccagctctggatttgtggaggagaagtccctcagtgatgtagaagaagaggaagctcctgaagatctgtataaggacttcctgaccttggagcatctcatctgttacagcttccaagtggctaagggcatggagttcttggcatcgcgaaagtgtatccacagggacctggcggcacgaaatatcctcttatcggagaagaacgtggttaaaatctgtgactttggcttggcccgggatatttataaagatccagattatgtcagaaaaggagatgctcgcctccctttgaaatggatggccccagaaacaatttttgacagagtgtacacaatccagagtgacgtctggtcttttggtgttttgctgtgggaaatattttccttaggtgcttctccatatcctggggtaaagattgatgaagaattttgtaggcgattgaaagaaggaactagaatgagggcccctgattatactacaccagaaatgtaccagaccatgctggactgctggcacggggagcccagtcagagacccacgttttcagagttggtggaacatttgggaaatctcttgcaagctaatgctcagcaggatggcaaagactacattgttcttccgatatcagagactttgagcatggaagaggattctggactctctctgcctacctcacctgtttcctgtatggaggaggaggaagtatgtgaccccaaattccattatgacaacacagcaggaatcagtcagtatctgcagaacagtaagcgaaagagccggcctgtgagtgtaaaaacatttgaagatatcccgttagaagaaccagaagtaaaagtaatcccagatgacaaccagacggacagtggtatggttcttgcctcagaagagctgaaaactttggaagacagaaccaaattatctccatcttttggtggaatggtgcccagcaaaagcagggagtctgtggcatctgaaggctcaaaccagacaagcggctaccagtccggatatcactccgatgacacagacaccaccgtgtactccagtgaggaagcagaacttttaaagctgatagagattggagtgcaaaccggtagcacagcccagattctccagcctgactcggggaccacactgagctctcctcctgtttaa

SEQ ID NO: 535 - DNA, 4071 bp, Homo sapiens
atgcagagcaaggtgctgctggccgtcgccctgtggctctgcgtggagacccgggccgcctctgtgggtttgcctagtgtttctcttgatctgcccaggctcagcatacaaaaagacatacttacaattaaggctaatacaactcttcaaattacttgcaggggacagagggacttggactggctttggcccaataatcagagtggcagtgagcaaagggtggaggtgactgagtgcagcgatggcctcttctgtaagacactcacaattccaaaagtgatcggaaatgacactggagcctacaagtgcttctaccgggaaactgacttggcctcggtcatttatgtctatgttcaagattacagatctccatttattgcttctgttagtgaccaacatggagtcgtgtacattactgagaacaaaaacaaaactgtggtgattccatgtctcgggtccatttcaaatctcaacgtgtcactttgtgcaagatacccagaaaagagatttgttcctgatggtaacagaatttcctgggacagcaagaagggctttactattcccagctacatgatcagctatgctggcatggtcttctgtgaagcaaaaattaatgatgaaagttaccagtctattatgtacatagttgtcgttgtagggtataggatttatgatgtggttctgagtccgtctcatggaattgaactatctgttggagaaaagcttgtcttaaattgtacagcaagaactgaactaaatgtggggattgacttcaactgggaatacccttcttcgaagcatcagcataagaaacttgtaaaccgagacctaaaaacccagtctgggagtgagatgaagaaatttttgagcaccttaactatagatggtgtaacccggagtgaccaaggattgtacacctgtgcagcatccagtgggctgatgaccaagaagaacagcacatttgtcagggtccatgaaaaaccttttgttgcttttggaagtggcatggaatctctggtggaagccacggtgggggagcgtgtcagaatccctgcgaagtaccttggttacccacccccagaaataaaatggtataaaaatggaataccccttgagtccaatcacacaattaaagcggggcatgtactgacgattatggaagtgagtgaaagagacacaggaaattacactgtcatccttaccaatcccatttcaaaggagaagcagagccatgtggtctctctggttgtgtatgtcccaccccagattggtgagaaatctctaatctctcctgtggattcctaccagtacggcaccactcaaacgctgacatgtacggtctatgccattcctcccccgcatcacatccactggtattggcagttggaggaagagtgcgccaacgagcccagccaagctgtctcagtgacaaacccatacccttgtgaagaatggagaagtgtggaggacttccagggaggaaataaaattgaagttaataaaaatcaatttgctctaattgaaggaaaaaacaaaactgtaagtacccttgttatccaagcggcaaatgtgtcagctttgtacaaatgtgaagcggtcaacaaagtcgggagaggagagagggtgatctccttccacgtgaccaggggtcctgaaattactttgcaacctgacatgcagcccactgagcaggagagcgtgtctttgtggtgcactgcagacagatctacgtttgagaacctcacatggtacaagcttggcccacagcctctgccaatccatgtgggagagttgcccacacctgtttgcaagaacttggatactctttggaaattgaatgccaccatgttctctaatagcacaaatgacattttgatcatggagcttaagaatgcatccttgcaggaccaaggagactatgtctgccttgctcaagacaggaagaccaagaaaagacattgcgtggtcaggcagctcacagtcctagagcgtgtggcacccacgatcacaggaaacctggagaatcagacgacaagtattggggaaagcatcgaagtctcatgcacggcatctgggaatccccctccacagatcatgtggtttaaagataatgagacccttgtagaagactcaggcattgtattgaaggatgggaaccggaacctcactatccgcagagtgaggaaggaggacgaaggcctctacacctgccaggcatgcagtgttcttggctgtgcaaaagtggaggcatttttcataatagaaggtgcccaggaaaagacgaacttggaaatcattattctagtaggcacggcggtgattgccatgttcttctggctacttcttgtcatcatcctacggaccgttaagcgggccaatggaggggaactgaagacaggctacttgtccatcgtcatggatccagatgaactcccattggatgaacattgtgaacgactgccttatgatgccagcaaatgggaattccccagagaccggctgaagctaggtaagcctcttggccgtggtgcctttggccaagtgattgaagcagatgcctttggaattgacaagacagcaacttgcaggacagtagcagtcaaaatgttgaaagaaggagcaacacacagtgagcatcgagctctcatgtctgaactcaagatcctcattcatattggtcaccatctcaatgtggtcaaccttctaggtgcctgtaccaagccaggagggccactcatggtgattgtggaattctgcaaatttggaaacctgtccacttacctgaggagcaagagaaatgaatttgtcccctacaagaccaaaggggcacgattccgtcaagggaaagactacgttggagcaatccctgtggatctgaaacggcgcttggacagcatcaccagtagccagagctcagccagctctggatttgtggaggagaagtccctcagtgatgtagaagaagaggaagctcctgaagatctgtataaggacttcctgaccttggagcatctcatctgttacagcttccaagtggctaagggcatggagttcttggcatcgcgaaagtgtatccacagggacctggcggcacgaaatatcctcttatcggagaagaacgtggttaaaatctgtgactttggcttggcccgggatatttataaagatccagattatgtcagaaaaggagatgctcgcctccctttgaaatggatggccccagaaacaatttttgacagagtgtacacaatccagagtgacgtctggtcttttggtgttttgctgtgggaaatattttccttaggtgcttctccatatcctggggtaaagattgatgaagaattttgtaggcgattgaaagaaggaactagaatgagggcccctgattatactacaccagaaatgtaccagaccatgctggactgctggcacggggagcccagtcagagacccacgttttcagagttggtggaacatttgggaaatctcttgcaagctaatgctcagcaggatggcaaagactacattgttcttccgatatcagagactttgagcatggaagaggattctggactctctctgcctacctcacctgtttcctgtatggaggaggaggaagtatgtgaccccaaattccattatgacaacacagcaggaatcagtcagtatctgcagaacagtaagcgaaagagccggcctgtgagtgtaaaaacatttgaagatatcccgttagaagaaccagaagtaaaagtaatcccagatgacaaccagacggacagtggtatggttcttgcctcagaagagctgaaaactttggaagacagaaccaaattatcttcatcttttggtggaatggtgcccagcaaaagcagggagtctgtggcatctgaaggctcaaaccagacaagcggctaccagtccggatatcactccgatgacacagacaccaccgtgtactccagtgaggaagcagaacttttaaagctgatagagattggagtgcaaaccggtagcacagcccagattctccagcctgactcggggaccacactgagctctcctcctgtttaa

SEQ ID NO: 536 - DNA, 1632 bp, Homo sapiens
atgggctgcattaaaagtaaagaaaacaaaagtccagccattaaatacagacctgaaaatactccagagcctgtcagtacaagtgtgagccattatggagcagaacccactacagtgtcaccatgtccgtcatcttcagcaaagggaacagcagttaatttcagcagtctttccatgacaccatttggaggatcctcaggggtaacgccttttggaggtgcatcttcctcattttcagtggtgccaagttcatatcctgctggtttaacaggtggtgttactatatttgtggccttatatgattatgaagctagaactacagaagacctttcatttcagaagggtgaaagatttcaaataattaacaatacggaaggagattggtgggaagcaagatcaatcgctacaggaaagaatggttatatcccgagcaattatgtagcgcctgcagattccattcaggcagaagaatggtattttggcaaaatggggagaaaagatgctgaaagattacttttgaatcctggaaatcaacgaggtattttcttagtaagagagagtgaaacaactaaaggtgcttattccctttctattcgtgattgggatgagataaggggtgacaatgtgaaacactacaaaattaggaaacttgacaatggtggatactatatcacaaccagagcacaatttgatactctgcagaaattggtgaaacactacacagaacatgctgatggtttatgccacaagttgacaactgtgtgtccaactgtgaaacctcagactcaaggtctagcaaaagatgcttgggaaatccctcgagaatctttgcgactagaggttaaactaggacaaggatgtttcggcgaagtgtggatgggaacatggaatggaaccacgaaagtagcaatcaaaacactaaaaccaggtacaatgatgccagaagctttccttcaagaagctcagataatgaaaaaattaagacatgataaacttgttccactatatgctgttgtttctgaagaaccaatttacattgtcactgaatttatgtcaaaaggaagcttattagatttccttaaggaaggagatggaaagtatttgaagcttccacagctggttgatatggctgctcagattgctgatggtatggcatatattgaaagaatgaactatattcaccgagatcttcgggctgctaatattcttgtaggagaaaatcttgtgtgcaaaatagcagactttggtttagcaaggttaattgaagacaatgaatacacagcaagacaaggtgcaaaatttccaatcaaatggacagctcctgaagctgcactgtatggtcggtttacaataaagtctgatgtctggtcatttggaattctgcaaacagaactagtaacaaagggccgagtgccatatccaggtatggtgaaccgtgaagtactagaacaagtggagcgaggatacaggatgccgtgccctcagggctgtccagaatccctccatgaattgatgaatctgtgttggaagaaggaccctgatgaaagaccaacatttgaatatattcagtccttcttggaagactacttcactgctacagagccacagtaccagccaggagaaaatttataa

SEQ ID NO: 537 - DNA, 1860 bp, Homo sapiens
atgccagaccccgcggcgcacctgcccttcttctacggcagcatctcgcgtgccgaggccgaggagcacctgaagctggcgggcatggcggacgggctcttcctgctgcgccagtgcctgcgctcgctgggcggctatgtgctgtcgctcgtgcacgatgtgcgcttccaccactttcccatcgagcgccagctcaacggcacctacgccattgccggcggcaaagcgcactgtggaccggcagagctctgcgagttctactcgcgcgaccccgacgggctgccctgcaacctgcgcaagccgtgcaaccggccgtcgggcctcgagccgcagccgggggtcttcgactgcctgcgagacgccatggtgcgtgactacgtgcgccagacgtggaagctggagggcgaggccctggagcaggccatcatcagccaggccccgcaggtggagaagctcattgctatgacggcccacgagcggatgccctggtaccacagcagcctgacgcgtgaggaggccgagcgcaaactttactctggggcgcagaccgacggcaagttcctgctgaggccgcggaaggagcagggcacatacgccctgtccctcatctatgggaagacggtgtaccactacctcatcagccaagacaaggcgggcaagtactgcattcccgagggcaccaagtttgacacgctctggcagctggtggagtatctgaagctgaaggcggacgggctcatctactgcctgaaggaggcctgccccaacagcagtgccagcaacgcctcaggggctgctgctcccacactcccagcccacccatccacgttgactcatcctcagagacgaatcgacaccctcaactcagatggatacacccctgagccagcacgcataacgtccccagacaaaccgcggccgatgcccatggacacgagcgtgtatgagagcccctacagcgacccagaggagctcaaggacaagaagctcttcctgaagcgcgataacctcctcatagctgacattgaacttggctgcggcaactttggctcagtgcgccagggcgtgtaccgcatgcgcaagaagcagatcgacgtggccatcaaggtgctgaagcagggcacggagaaggcagacacggaagagatgatgcgcgaggcgcagatcatgcaccagctggacaacccctacatcgtgcggctcattggcgtctgccaggccgaggccctcatgctggtcatggagatggctgggggcgggccgctgcacaagttcctggtcggcaagagggaggagatccctgtgagcaatgtggccgagctgctgcaccaggtgtccatggggatgaagtacctggaggagaagaactttgtgcaccgtgacctggcggcccgcaacgtcctgctggttaaccggcactacgccaagatcagcgactttggcctctccaaagcactgggtgccgacgacagctactacactgcccgctcagcagggaagtggccgctcaagtggtacgcacccgaatgcatcaacttccgcaagttctccagccgcagcgatgtctggagctatggggtcaccatgtgggaggccttgtcctacggccagaagccctacaagaagatgaaagggccggaggtcatggccttcatcgagcagggcaagcggatggagtgcccaccagagtgtccacccgaactgtacgcactcatgagtgactgctggatctacaagtgggaggatcgccccgacttcctgaccgtggagcagcgcatgcgagcctgttactacagcctggccagcaaggtggaagggcccccaggcagcacacagaaggctgaggctgcctgtgcctga

SEQ ID NO: 538 - DNA, 1860 bp, Homo sapiens
atgccagaccccgcggcgcacctgcccttcttctacggcagcatctcgcgtgccgaggccgaggagcacctgaagctggcgggcatggcggacgggctcttcctgctgcgccagtgcctgcgctcgctgggcggctatgtgctgtcgctcgtgcacgatgtgcgcttccaccactttcccatcgagcgccagctcaacggcacctacgccattgccggcggcaaagcgcactgtggaccggcagagctctgcgagttctactcgcgcgaccccgacgggctgccctgcaacctgcgcaagccgtgcaaccggccgtcgggcctcgagccgcagccgggggtcttcgactgcctgcgagacgccatggtgcgtgactacgtgcgccagacgtggaagctggagggcgaggccctggagcaggccatcatcagccaggccccgcaggtggagaagctcattgctacgacggcccacgagcggatgccctggtaccacagcagcctgacgcgtgaggaggccgagcgcaaactttactctggggcgcagaccgacggcaagttcctgctgaggccgcggaaggagcagggcacatacgccctgtccctcatctatgggaagacggtgtaccactacctcatcagccaagacaaggcgggcaagtactgcattcccgagggcaccaagtttgacacgctctggcagctggtggagtatctgaagctgaaggcggacgggctcatctactgcctgaaggaggcctgccccaacagcagtgccagcaacgcctcaggggctgctgctcccacactcccagcccacccatccacgttgactcatcctcagagacgaatcgacaccctcaactcagatggatacacccctgagccagcacgcataacgtccccagacaaaccgcggccgatgcccatggacacgagcgtgtatgagagcccctacagcgacccagaggagctcaaggacaagaagctcttcctgaagcgcgataacctcctcatagctgacattgaacttggctgcggcaactttggctcagtgcgccagggcgtgtaccgcatgcgcaagaagcagatcgacgtggccatcaaggtgctgaagcagggcacggagaaggcagacacggaagagatgatgcgcgaggcgcagatcatgcaccagctggacaacccctacatcgtgcggctcattggcgtctgccaggccgaggccctcatgctggtcatggagatggctgggggcgggccgctgcacaagttcctggtcggcaagagggaggagatccctgtgagcaatgtggccgagctgctgcaccaggtgtccatggggatgaagtacctggaggagaagaactttgtgcaccgtgacctggcggcccgcaacgtcctgctggttaaccggcactacgccaagatcagcgactttggcctctccaaagcactgggtgccgacgacagctactacactgcccgctcagcagggaagtggccgctcaagtggtacgcacccgaatgcatcaacttccgcaagttctccagccgcagcgatgtctggagctatggggtcaccatgtgggaggccttgtcctacggccagaagccctacaagaagatgaaagggccggaggtcgtggccttcatcgagcagggcaagcggatggagtgcccaccagagtgtccacccgaactgtacgcactcatgagtgactgctggatctacaagtgggaggatcgccccgacttcctgaccgtggagcagcgcatgcgagcctgttactacagcctggccagcaaggtggaagggcccccaggcagcacacagaaggctgaggctgcctgtgcctga

SEQ ID NO: 539 - protein, 1271 aa, Homo sapiens [sequence omitted]

SEQ ID NO: 540 - protein, 1271 aa, Homo sapiens
MAKQPGRSVQLLKSTDVGRHSLLYLKEIGRGWFGKVFLGEVNSGISSAQVVVKELQASASVQEQMQFLEEVQPYRALKHSNLLQCLAQCAEVTPYLLVMEFCPLGDLKGYLRSCRVAESMAPDPRTLQRMACEVACGVLHLHRNNFVHSDLALRNCLLTADLTVKIGDYGLAHCKYREDYFVTADQLWVPLRWIAPELVDEVHSNLLVVDQTKSGNVWSLGVTIWELFELGTQPYPQHSDQQVLAYTVREQQLKLPKPQLQLTLSDRWYEVMQFCWLQPEQRPTAEEVHLLLSYLCAKGATEAEEEFERRWRSLRPGGGGVGPGPGAAGPMLGGVVELAAASSFPLLEQFAGDGFHADGDDVLTVTETSRGLNFEYKWEAGRGAEAFPATLSPGRTARLQELCAPDGAPPGVVPVLSAHSPSLGSEYFIRLEEAAPAAGHDPDCAGCAPSPPATADQDDDSDGSTAASLAMEPLLGHGPPVDVPWGRGDHYPRRSLARDPLCPSRSPSPSAGPLSLAEGGAEDADWGVAAFCPAFFEDPLGTSPLGSSGAPPLPLTGEDELEEVGARRAAQRGHWRSNVSANNNSGSRCPESWDPVSAGGHAEGCPSPKQTPRASPEPGYPGEPLLGLQAASAQEPGCCPSLPHLCSAQGLAPAPCLVTPSWTETASSGGDHPQAEPKLATEAEGTTGPRLPLPSVPSPSQEGAPLPSEEASAPDAPDALPDSPTPATGGEVSAIKLASALNGSSSSPEVEAPSSEDEDTAEATSGIFTDTSSDGLQARRPDVVPAFRSLQKQVGTPDSLDSLDIPSSASDGGYEVFSPSATGPSGGQPRALDSGYDTENYESPEFVLKEAQEGCEPQAFAELASEGEGPGPETRLSTSLSGLNEKNPYRDSAYFSDLEAEAEATSGPEKKCGGDRAPGPELGLPSTGQPSEQVCLRPGVSGEAQGSGPGEVLPPLLQLEGSSPEPSTCPSGLVPEPPEPQGPAKVRPGPSPSCSQFFLLTPVPLRSEGNSSEFQGPPGLLSGPAPQKRMGGPGTPRAPLRLALPGLPAALEGRPEEEEEDSEDSDESDEELRCYSVQEPSEDSEEEAPAVPVVVAESQSARNLRSLLKMPSLLSETFCEDLERKKKAVSFFDDVTVYLFDQESPTRELGEPFPGAKESPPTFLRGSPGSPSAPNRPQQADGSPNGSTAEEGGGFAWDDDFPLMTAKAAFAMALDPAAPAPAAPTPTPAPFSRFTVSPAPTSRFSITHVSDSDAESKRGPEAGAGGESKEA

SEQ ID NO: 541 - protein, 1271 aa, Homo sapiens
MAKQPGRSVQLLKSTDVGRHSLLYLKEIGRGWFGKVFLGEVNSGISSAQVVVKELQASASVQEQMQFLEEVQPYRALKHSNLLQCLAQCAEVTPYLLVMEFCPLGDLKGYLRSCRVAESMAPDPRTLQRMACEVACGVLHLHRNNFVHSDLALRNCLLTADLTVKIGDYGLAHCKYREDYFVTADQLWVPLRWIAPELVDEVHSNLLVVDQTKSGNVWSLGVTIWELFELGTQPYPQHSDQQVLAYTVREQQLKLPKPQLQLTLSDRWYEVMQFCWLQPEQRPTAEEVHLLLSYLCAKGATEAEEEFERRWRSLRPGGGGVGPGPGAAGPMLGGVVELAAASSFPLLEQFAGDGFHADGDDVLTVTETSRGLNFEYKWEAGRGAEAFPATLSPGRTARLQELCAPDGAPPGVVPVLSAHSPSLGSEYFIRLEEAAPAAGHDPDCAGCAPSPPATADQDDDSDGSTAASLAMEPLLGHGPPVDVPWGRGDHYPRRSLARDPLCPSRSPSPSAGPLSLAEGGAEDADWGVAAFCPAFFEDPLGTSPLGSSGAPPLPLTGEDELEEVGARRAAQRGHWRSNVSANNNSGSRCPESWDPVSAGGHAEGCPSPKQTPRASPEPGYPGEPLLGLQAASAQEPGCCPGLPHLCSAQGLAPAPCLVTPSWTETASSGGDHPQAEPKLATEAEGTTGPRLPLPSVPSPSQEGAPLPSEEASAPDAPDALPDSPTPATGGEVSAIKLASALNGSSSSPEVEAPSSEDEDTAEATSGIFTDTSSDGLQARRPDVVPAFRSLQKQVGTPDSLDSLDIPSSASDGGYEVFSPSATGPSGGQPRALDSGYDTENYESPEFVLKEAQEGCEPQAFAELASEGEGPGPETRLSTSLSGLNEKNPYRDSAYFSDLEAEAEATSGPEKKCGGDRAPGPELGLPSTGQPSEQVCLRPGVSGEAQGSGPGEVLPPLLQLEGSSPEPSTCPSGLVPEPPEPQGPAKVRPGPSPSCSQFFLLTPVPLRSEGNSSEFQGPPGLLSGPAPQKRMGGPGTPRAPLRLALPGLPAALEGRPEEEEEDSEDSDESDEELRCYSVQEPSEDSEEEAPAVPVVVAESQSARNLRSLLKMPSLLSETFCEDLERKKKAVSFFDDVTVYLFDQESPTRELGEPFPGAKESPPTSLRGSPGSPSAPNRPQQADGSPNGSTAEEGGGFAWDDDFPLMTAKAAFAMALDPAAPAPAAPTPTPAPFSRFTVSPAPTSRFSITHVSDSDAESKRGPEAGAGGESKEA

SEQ ID NO: 542 - protein, 1271 aa, Homo sapiens
MAKQPGRSVQLLKSTDVGRHSLLYLKEIGRGWFGKVFLGEVNSGISSAQVVVKELQASASVQEQMQFLEEVQPYRALKHSNLLQCLAQCAEVTPYLLVMEFCPLGDLKGYLRSCRVAESMAPDPRTLQRMACEVACGVLHLHRNNFVHSDLALRNCLLTADLTVKIGDYGLAHCKYREDYFVTADQLWVPLRWIAPELVDEVHSNLLVVDQTKSGNVWSLGVTIWELFELGTQPYPQHSDQQVLAYTVREQQLKLPKPQLQLTLSDRWYEVMQFCWLQPEQRPTAEEVHLLLSYLCAKGATEAEEEFERRWRSLRPGGGGVGPGPGAAGPMLGGVVELAAASSFPLLEQFAGDGFHADGDDVLTVTETSRGLNFEYKWEAGRGAEAFPATLSPGRTARLQELCAPDGAPPGVVPVLSAHSPSLGSEYFIRLEEAAPAAGHDPDCAGCAPSPPATADQDDDSDGSTAASLAMEPLLGHGPPVDVPWGRGDHYPRRSLARDPLCPSRSPSPSAGPLSLAEGGAEDADWGVAAFCPAFFEDPLGTSPLGSSGAPPLPLTGEDELEEVGARRAAQRGHWRSNVSANNNSGSRCPESWDPVSAGGHAEGCPSPKQTPRASPEPGYPGEPLLGLQAASAQEPGCCPGLPHLCSAQGLAPAPCLVTPSWTETASSGGDHPQAEPKLATEAEGTTGPRLPLPSVPSPSQEGAPLPSEEASAPDAPDALPDSPTPATGGEVSAIKLASALNGSSSSPEVEAPSSEDEDTAEATSGIFTDTSSDGLQARRPDVVPAFRSLQKQVGTPDSLDSLDIPSSASDGGYEVFSPSATGPSGGQPRALDSGYDTENYESPEFVLKEAQEGCEPQAFAELASEGEGPGPETRLSTSLSGLNEKNPYRDSAYFSDLEAEAEATSGPEKKCGGDRAPGPELGLPSTGQPSEQVCLRPGVSGEAQGSGPGEVLPPLLQLEGSSPEPSTCPSGLVPEPPEPQGPAKVRPGPSPSCSQFFLLTPVPLRSEGNSSEFQGPPGLLSGPAPQKRMGGPGTPRAPLRLALPGLPAALEGRPEEEEEDSEDSDESDEELRCYSVQEPSEDSEEEAPAVPVVVAESQSARNLRSLLKMPSLLSETFCEDLERKKKAVSFFDDVTVYLFDQESPTRELGEPFPGAKESPPTFLRGSPGSPSAPNRPQQADGSPNGSTAEEGGGFAWDDDFPLMTAKAAFAMALDPAAPAPAAPTPMPAPFSRFTVSPAPTSRFSITHVSDSDAESKRGPEAGAGGESKEA

SEQ ID NO: 543 - protein, 1149 aa, Homo sapiens [sequence omitted]

SEQ ID NO: 544 - protein, 1149 aa, Homo sapiens
MGQQPGKVLGDQRRPSLPALHFIKGAGKKESSRHGGPHCNVFVEHEALQRPVASDFEPQGLSEAARWNSKENLLAGPSENDPNLFVALYDFVASGDNTLSITKGEKLRVLGYNHNGEWCEAQTKNGQGWVPSNYITPVNSLEKHSWYHGPVSRNAAEYLLSSGINGSFLVRESESSPGQRSISLRYEGRVYHYRINTASDGKLYVSSESRFNTLAELVHHHSTVADGLITTLHYPAPKRNKPTVYGVSPNYDKWEMERTDITMKHKLGGGQYGEVYEGVWKKYSLTVAVKTLKEDTMEVEEFLKEAAVMKEIKHPNLVQLLGVCTREPPFYIITEFMTYGNLLDYLRECNRQEVNAVVLLYMATQISSAMEYLEKKNFIHRDLAARNCLVGENHLVKVADFGLSRLMTGDTYTAHAGAKFPIKWTAPESLAYNKFSIKSDVWAFGVLLWEIATYGMSPYPGIDLSQVYELLEKDYRMERPEGCPEKVYELMRACWQWNPSDRPSFAEIHQAFETMFQESSISDEVEKELGKQGVRGAVSTLLQAPELPTKTRTSRRAAEHRDTTDVPEMPHSKGQGESDPLDHEPAVSPLLPRKERGPPEGGLNEDERLLPKDKKTNLFSALIKKKKKTAPTPPKRSSSFREMDGQPERRGAGEEEGRDISNGALAFTPLDTADPAKSPKPSNGAGVPNGALRESGGSGFRSPHLWKKSSTLTSSRLATGEEEGGGSSSKRFLRSCSASCVPHGAKDTEWRSVTLPRDLQSTGRQFDSSTFGGHKSEKPALPRKRAGENRSDQVTRGTVTPPPRLVKKNEEAADEVFKDIMESSPGSSPPNLTPKPLRRQVTVAPASGLPHKEEAGKGSALGTPAAAEPVTPTSKAGSGAPGGTSKGPAEESRVRRHKHSSESPGRDKGKLSRLKPAPPPPPAASAGKAGGKPSQSPSQEAAGEAVLGAKTKATSLVDAVNSDAAKPSQPGEGLKKPVLPATPKPQSAKPLGTPISPAPVPSTLPSASSALAGDQPSSTAFIPLISTRVSLRKTRQPPERIASGAITKGVVLDSTEALCLAISRNSEQMASHSAVLEAGKNLYTFCVSYVDSIQQMRNKFAFREAINKLENNLRELQICPATAGSGPAATQDFSKLLSSVKEISDIVQR

SEQ ID NO: 545 - protein, 1038 aa, Homo sapiens
MQPEEGTGWLLELLSEVQLQQYFLRLRDDLNVTRLSHFEYVKNEDLEKIGMGRPGQRRLWEAVKRRKALCKRKSWMSKVFSGKRLEAEFPPHHSQSTFRKTSPAPGGPAGEGPLQSLTCLIGEKDLRLLEKLGDGSFGVVRRGEWDAPSGKTVSVAVKCLKPDVLSQPEAMDDFIREVNAMHSLDHRNLIRLYGVVLTPPMKMVTELAPLGSLLDRLRKHQGHFLLGTLSRYAVQVAEGMGYLESKRFIHRDLAARNLLLATRDLVKIGDFGLMRALPQNDDHYVMQEHRKVPFAWCAPESLKTRTFSHASDTWMFGVTLWEMFTYGQEPWIGLNGSQILHKIDKEGERLPRPEDCPQDIYNVMVQCWAHKPEDRPTFVALRDFLLEAQPTDMRALQDFEEPDKLHIQMNDVITVIEGRAENYWWRGQNTRTLCVGPFPRNVVTSVAGLSAQDISQPLQNSFIHTGHGDSDPRHCWGFPDRIDELYLGNPMDPPDLLSVELSTSRPPQHLGGVKKPTYDPVSEDQDPLSSDFKRLGLRKPGLPRGLWLAKPSARVPGTKASRGSGAEVTLIDFGEEPVVPALRPCAPSLAQLAMDACSLLDETPPQSPTRALPRPLHPTPVVDWDARPLPPPPAYDDVAQDEDDFEICSINSTLVGAGVPAGPSQGQTNYAFVPEQARPPPPLEDNLFLPPQGGGKPPSSAQTAEIFQALQQECMRQLQAPAGSLAPSPSPGGDDKPQVPPRVPIPPRPTRPHVQLSPAPPGEEETSQWPGPASPPRVPPREPLSPQGSRTPSPLVPPGSSPLPPRLSSSPGKTMPTTQSFASDPKYATPQVIQAPGPRAGPCILPIVRDGKKVSSTHYYLLPERPSYLERYQRFLREAQSPEEPTPLPVPLLLPPPSTPAPAAPTATVRPMPQAALDPKANFSTNNSNPGARPPPPRATARLPQRGCPGDGPEAGRPADKIQMAMVHGVTTEECQAALQCHGWSVQRAAQYLKVEQLFGLGLRPRGECHKVLEMFDWNLEQAGCHLLGSWGPAHHKR

SEQ ID NO: 546 - protein, 1038 aa, Homo sapiens
MQPEEGTGWLLELLSEVQLQQYFLRLRDDLNVTRLSHFEYVKNEDLEKIGMGRPGQRRLWEAVKRRKALCKRKSWMSKVFSGKRLEAEFPPHHSQSTFRKTSPAPGGPAGEGPLQSLTCLIGEKDLRLLEKLGDGSFGVVRRGEWDAPSGKTVSVAVKCLKPDVLSQPEAMDDFIREVNAMHSLDHRNLIRLYGVVLTPPMKMVTELAPLGSLLDRLRKHQGHFLLGTLSRYAVQVAEGMGYLESKRFIHRDLAARNLLLATRDLVKIGDFGLMRALPQNDDHYVMQEHRKVPFAWCAPESLKTRTFSHASDTWMFGVTLWEMFTYGQEPWIGLNGSQILHKIDKEGERLPRPEDCPQDIYNVMVQCWAHKPEDRPTFVALRDFLLEAQPTDMRALQDFEEPDKLHIQMNDVITVIEGRAENYWWRGQNTRTLCVGPFPRNVVTSVAGLSAQDISQPLQNSFIHTGHGDSDPRHCWGFPDRIDELYLGNPMDPPDLLSVELSTSRPPQHLGGVKKPTYDPVSEDQDPLSSDFKRLGLRKPGLPRGLWLAKPSARVPGTKASRGSGAEVTLIDFGEEPVVPALRPCAPSLAQLAMDACSLLDETPPQSPTRALPRPLHPTPVVDWDARPLPPPPAYDDVAQDEDDFEICSINSTLVGAGVPAGPSQGQTNYAFVPEQARPPPPLEDNLFLPPQGGGKPPSSAQTAEIFQALQQECMRQLQAPAGSPAPSPSPGGDDKPQVPPRVPIPPRPTRPHVQLSPAPPGEEETSQWPGPASPPRVPPREPLSPQGSRTPSPLVPPGSSPLPPRLSSSPGKTMPTTQSFASDPKYATPQVIQAPGPRAGPCILPIVRDGKKVSSTHYYLLPERPSYLERYQRFLREAQSPEEPTPLPVPLLLPPPSTPAPAAPTATVRPMPQAALDPKANFSTNNSNPGARPPPPRATARLPQRGCPGDGPEAGRPADKIQMAMVHGVTTEECQAALQCHGWSVQRAAQYLKVEQLFGLGLRPRGECHKVLEMFDWNLEQAGCHLLGSWGPAHHKH

SEQ ID NO: 547 - protein, 1620 aa, Homo sapiens
MGAIGLLWLLPLLLSTAAVGSGMGTGQRAGSPAAGPPLQPREPLSYSRLQRKSLAVDFVVPSLFRVYARDLLLPPSSSELKAGRPEARGSLALDCAPLLRLLGPAPGVSWTAGSPAPAEARTLSRVLKGGSVRKLRRAKQLVLELGEEAILEGCVGPPGEAAVGLLQFNLSELFSWWIRQGEGRLRIRLMPEKKASEVGREGRLSAAIRASQPRLLFQIFGTGHSSLESPTNMPSPSPDYFTWNLTWIMKDSFPFLSHRSRYGLECSFDFPCELEYSPPLHDLRNQSWSWRRIPSEEASQMDLLDGPGAERSKEMPRGSFLLLNTSADSKHTILSPWMRSSSEHCTLAVSVHRHLQPSGRYIAQLLPHNEAAREILLMPTPGKHGWTVLQGRIGRPDNPFRVALEYISSGNRSLSAVDFFALKNCSEGTSPGSKMALQSSFTCWNGTVLQLGQACDFHQDCAQGEDESQMCRKLPVGFYCNFEDGFCGWTQGTLSPHTPQWQVRTLKDARFQDHQDHALLLSTTDVPASESATVTSATFPAPIKSSPCELRMSWLIRGVLRGNVSLVLVENKTGKEQGRMVWHVAAYEGLSLWQWMVLPLLDVSDRFWLQMVAWWGQGSRAIVAFDNISISLDCYLTISGEDKILQNTAPKSRNLFERNPNKELKPGENSPRQTPIFDPTVHWLFTTCGASGPHGPTQAQCNNAYQNSNLSVEVGSEGPLKGIQIWKVPATDTYSISGYGAAGGKGGKNTMMRSHGVSVLGIFNLEKDDMLYILVGQQGEDACPSTNQLIQKVCIGENNVIEEEIRVNRSVHEWAGGGGGGGGATYVFKMKDGVPVPLIIAAGGGGRAYGAKTDTFHPERLENNSSVLGLNGNSGAAGGGGGWNDNTSLLWAGKSLQEGATGGHSCPQAMKKWGWETRGGFGGGGGGCSSGGGGGGYIGGNAASNNDPEMDGEDGVSFISPLGILYTPALKVMEGHGEVNIKHYLNCSHCEVDECHMDPESHKVICFCDHGTVLAEDGVSCIVSPTPEPHLPLSLILSVVTSALVAALVLAFSGIMIVYRRKHQELQAMQMELQSPEYKLSKLRTSTIMTDYNPNYCFAGKTSSISDLKEVPRKNITLIRGLGHGAFGEVYEGQVSGMPNDPSPLQVAVKTLPEVCSEQDELDFLMEALIISKFNHQNIVRCIGVSLQSLPRFILLELMAGGDLKSFLRETRPRPSQPSSLAMLDLLHVARDIACGCQYLEENHFIHRDIAARNCLLTCPGPGRVAKIGDFGMARDIYRASYYRKGGCAMLPVKWMPPEAFMEGIFTSKTDTWSFGVLLWEIFSLGYMPYPSKSNQEVLEFVTSGGRMDPPKNCPGPVYRIMTQCWQHQPEDRPNFAIILERIEYCTQDPDVINTALPIEYGPLVEEEEKVPVRPKDPEGVPPLLVSQQAKREEERSPAAPPPLPTTSSGKAAKKPTAAEISVRVPRGPAVEGGHVNMAFSQSNPPSELHRVHGSRNKPTSLWNPTYGSWFTEKPTKKNNPIAKKEPHDRGNLGLEGSCTVPPNVATGRLPGASLLLEPSSLTANMKEVPLFRLRHFPCGNVNYGYQQQGLPLEAATAPGAGHYEDTILKSKNSMNQPGP

SEQ ID NO: 548 - protein, 1620 aa, Homo sapiens
MGAIGLLWLLPLLLSTAAVGSGMGTGQRAGSPAAGPPLQPREPLSYSRLQRKSLAVDFVVPSLFRVYARDLLLPPSSSELKAGRPEARGSLALDCAPLLRLLGPAPGVSWTAGSPAPAEARTLSRVLKGGSVRKLRRAKQLVLELGEEAILEGCVGPPGEAAVGLLQFNLSELFSWWIRQGEGRLRIRLMPEKKASEVGREGRLSAAIRASQPRLLFQIFGTGHSSLESPTNMPSPSPDYFTWNLTWIMKDSFPFLSHRSRYGLECSFDFPCELEYSPPLHDLRNQSWSWRRIPSEEASQMDLLDGPGAERSKEMPRGSFLLLNTSADSKHTILSPWMRSSSEHCTLAVSVHRHLQPSGRYIAQLLPHNEAAREILLMPTPGKHGWTVLQGRIGRPDNPFRVALEYISSGNRSLSAVDFFALKNCSEGTSPGSKMALQSSFTCWNGTVLQLGQACDFHQDCAQGEDESQMCRKLPVGFYCNFEDGFCGWTQGTLSPHTPQWQVRTLKDARFQDHQDHALLLSTTDVPASESATVTSATFPAPIKSSPCELRMSWLIRGVLRGNVSLVLVENKTGKEQGRMVWHVAAYEGLSLWQWMVLPLLDVSDRFWLQMVAWWGQGSRAIVAFDNISISLDCYLTISGEDKILQNTAPKSRNLFERNPNKELKPGENSPRQTPIFDPTVHWLFTTCGASGPHGPTQAQCNNAYQNSNLSVEVGSEGPLKGIQIWKVPATDTYSISGYGAAGGKGGKNTMMRSHGVSVLGIFNLEKDDMLYILVGQQGEDACPSTNQLIQKVCIGENNVIEEEIRVNRSVHEWAGGGGGGGGATYVFKMKDGVPVPLIIAAGGGGRAYGAKTDTFHPERLENNSSVLGLNGNSGAAGGGGGWNDNTSLLWAGKSLQEGATGGHSCPQAMKKWGWETRGGFGGGGGGCSSGGGGGGYIGGNAASNNDPEMDGEDGVSFISPLGILYTPALKVMEGHGEVNIKHYLNCSHCEVDECHMDPESHKVICFCDHGTVLAEDGVSCIVSPTPEPHLPLSLILSVVTSALVAALVLAFSGIMIVYRRKHQELQAMQMELQSPEYKLSKLRTSTIMTDYNPNYCFAGKTSSISDLKEVPRKNITLIRGLGHGAFGEVYEGQVSGMPNDPSPLQVAVKTLPEVCSEQDELDFLMEALIISKFNHQNIVRCIGVSLQSLPRFILLELMAGGDLKSFLRETRPRPSQPSSLAMLDLLHVARDIACGCQYLEENHFIHRDIAARNCLLTCPGPGRVAKIGDFGMARDIYRASYYRKGGCAMLPVKWMPPEAFMEGIFTSKTDTWSFGVLLWEIFSLGYMPYPSKSNQEVLEFVTSGGRMDPPKNCPGPVYRIMTQCWQHQPEDRPNFAIILERIEYCTQDPDVINTALPIEYGPLVEEEEKVPVRPKDPEGVPPLLVSQQAKREEERSPAAPPPLPTTSSGKAAKKPTAAEISVRVPRGPAVEGGHVNMAFSQSNPPSELHKVHGSRNKPTSLWNPTYGSWFTEKPTKKNNPIAKKEPHERGNLGLEGSCTVPPNVATGRLPGASLLLEPSSLTANMKEVPLFRLRHFPCGNVNYGYQQQGLPLEAATAPGAGHYEDTILKSKNSMNQPGP

SEQ ID NO: 549 - protein, 1182 aa, Homo sapiens
MGQQVGRVGEAPGLQQPQPRGIRGSSAARPSGRRRDPAGRTTETGFNIFTQHDHFASCVEDGFEGDKTGGSSPEALHRPYGCDVEPQALNEAIRWSSKENLLGATESDPNLFVALYDFVASGDNTLSITKGEKLRVLGYNQNGEWSEVRSKNGQGWVPSNYITPVNSLEKHSWYHGPVSRSAAEYLLSSLINGSFLVRESESSPGQLSISLRYEGRVYHYRINTTADGKVYVTAESRFSTLAELVHHHSTVADGLVTTLHYPAPKCNKPTVYGVSPIHDKWEMERTDITMKHKLGGGQYGEVYVGVWKKYSLTVAVKTLKEDTMEVEEFLKEAAVMKEIKHPNLVQLLGVCTLEPPFYIVTEYMPYGNLLDYLRECNREEVTAVVLLYMATQISSAMEYLEKKNFIHRDLAARNCLVGENHVVKVADFGLSRLMTGDTYTAHAGAKFPIKWTAPESLAYNTFSIKSDVWAFGVLLWEIATYGMSPYPGIDLSQVYDLLEKGYRMEQPEGCPPKVYELMRACWKWSPADRPSFAETHQAFETMFHDSSISEEVAEELGRAASSSSVVPYLPRLPILPSKTRTLKKQVENKENIEGAQDATENSASSLAPGFIRGAQASSGSPALPRKQRDKSPSSLLEDAKETCFTRDRKGGFFSSFMKKRNAPTPPKRSSSFREMENQPHKKYELTGNFSSVASLQHADGFSFTPAQQEANLVPPKCYGGSFAQRNLCNDDGGGGGGSGTAGGGWSGITGFFTPRLIKKTLGLRAGKPTASDDTSKPFPRSNSTSSMSSGLPEQDRMAMTLPRNCQRSKLQLERTVSTSSQPEENVDRANDMLPKKSEESAAPSRERPKAKLLPRGATALPLRTPSGDLAITEKDPPGVGVAGVAAAPKGKEKNGGARLGMAGVPEDGEQPGWPSPAKAAPVLPTTHNHKVPVLISPTLKHTPADVQLIGTDSQGNKFKLLSEHQVTSSGDKDRPRRVKPKCAPPPPPVMRLLQHPSICSDPTEEPTALTAGQSTSETQEGGKKAALGAVPISGKAGRPVMPPPQVPLPTSSISPAKMANGTAGTKVALRKTKQAAEKISADKISKEALLECADLLSSALTEPVPNSQLVDTGHQLLDYCSGYVDCIPQTRNKFAFREAVSKLELSLQELQVSSAAAGVPGTNPVLNNLLSCVQEISDVVQR

SEQ ID NO: 550 - protein, 894 aa, Homo sapiens
MAWRCPRMGRVPLAWCLALCGWACMAPRGTQAEESPFVGNPGNITGARGLTGTLRCQLQVQGEPPEVHWLRDGQILELADSTQTQVPLGEDEQDDWIVVSQLRITSLQLSDTGQYQCLVFLGHQTFVSQPGYVGLEGLPYFLEEPEDRTVAANTPFNLSCQAQGPPEPVDLLWLQDAVPLATAPGHGPQRSLHVPGLNKTSSFSCEAHNAKGVTTSRTATITVLPQQPRNLHLVSRQPTELEVAWTPGLSGIYPLTHCTLQAVLSDDGMGIQAGEPDPPEEPLTSQASVPPHQLRLGSLHPHTPYHIRVACTSSQGPSSWTHWLPVETPEGVPLGPPENISATRNGSQAFVHWQEPRAPLQGTLLGYRLAYQGQDTPEVLMDIGLRQEVTLELQGDGSVSNLTVCVAAYTAAGDGPWSLPVPLEAWRPGQAQPVHQLVKEPSTPAFSWPWWYVLLGAVVAAACVLILALFLVHRRKKETRYGEVFEPTVERGELVVRYRVRKSYSRRTTEATLNSLSISEELKEKLRDVMVDRHKVALGKTLGEGEFGAVMEGQLNQDDSILKVAVKTMKIAICTRSELEDFLSEAVCMKEFDHPNVMRLIGVCFQGSERESFPAPVVILPFMKHGDLHSFLLYSRLGDQPVYLPTQMLVKFMADIASGMEYLSTKRFIHRDLAARNCMLNENMSVCVADFGLSKKIYNGDYYRQGRIAKMPVKWIAIESLADRVYTSKSDVWSFGVTMWEIATRGQTPYPGVENSEIYDYLRQGNRLKQPADCLDGLYALMSRCWELNPQDRPSFTELREDLENTLKALPPAQEPDEILYVNMDEGGGYPEPPGAAGGADPPTQPDPKDSCSCLTAAEVHPAGRYVLCPSTTPSPAQPADRGSPAAPGQEDGA

SEQ ID NO: 551 - protein, 1070 aa, Homo sapiens
MGAARGSPARPRRLPLLSVLLLPLLGGTQTAIVFIKQPSSQDALQGRRALLRCEVEAPGPVHVYWLLDGAPVQDTERRFAQGSSLSFAAVDRLQDSGTFQCVARDDVTGEEARSANASFNIKWIEAGPVVLKHPASEAEIQPQTQVTLRCHIDGHPRPTYQWFRDGTPLSDGQSNHTVSSKERNLTLRPAGPEHSGLYSCCAHSAFGQACSSQNFTLSIADESFARVVLAPQDVVVARYEEAMFHCQFSAQPPPSLQWLFEDETPITNRSRPPHLRRATVFANGSLLLTQVRPRNAGIYRCIGQGQRGPPIILEATLHLAEIEDMPLFEPRVFTAGSEERVTCLPPKGLPEPSVWWEHAGVRLPTHGRVYQKGHELVLANIAESDAGVYTCHAANLAGQRRQDVNITVATVPSWLKKPQDSQLEEGKPGYLDCLTQATPKPTVVWYRNQMLISEDSRFEVFKNGTLRINSVEVYDGTWYRCMSSTPAGSIEAQARVQVLEKLKFTPPPQPQQCMEFDKEATVPCSATGREKPTIKWERADGSSLPEWVTDNAGTLHFARVTRDDAGNYTCIASNGPQGQIRAHVQLTVAVFITFKVEPERTTVYQGHTALLQCEAQGDPKPLIQWKGKDRILDPTKLGPRMHIFQNGSLVIHDVAPEDSGRYTCIAGNSCNIKHTEAPLYVVDKPVPEESEGLGSPPPYKMIQTIGLSVGAAVAYIIAVLGLMFYCKKRCKAKRLQKQPEGEEPEMECLNGGPLQNGQPSAEIQEEVALTSLGSGPAATNKRHSTSDKMHFPRSSLQPITTLGKSEFGEVFLAKAQGLEEGVAETLVLVKSLQSKDEQQQLDFRRELEMFGKLNHANVVRLLGLCREAEPHYMVLEYVDLGDLKQFLRISKSKDEKLKSQPLSTKQKVALCTQVALGMEHLSNNRFVHKDLAARNCLVSAQRQVKVSALGLSKDVYNSEYYHFRQAWVPLRWMSPEAILEGDFSTKSDVWAFGVLMWEVFTHGEMPHGGQADDEVLADLQAGKARLPQPEGCPSKLYRLMQRCWALSPKDRPSFSEIASALGDSTVDSKP

SEQ ID NO: 552 - protein, 1070 aa, Homo sapiens
MGAARGSPARPRRLPLLSVLLLPLLGGTQTAIVFIKQPSSQDALQGRRALLRCEVEAPGPVHVYWLLDGAPVQDTERRFAQGSSLSFAAVDRLQDSGTFQCVARDDVTGEEARSANASFNIKWIEAGPVVLKHPASEAEIQPQTQVTLRCHIDGHPRPTYQWFRDGTPLSDGQSNHTVSSKERNLTLRPAGPEHSGLYSCCAHSAFGQACSSQNFTLSIADESFARVVLAPQDVVVARYEEAMFHCQFSAQPPPSLQWLFEDETPITNRSRPPHLRRATVFANGSLLLTQVRPRNAGIYRCIGQGQRGPPIILEATLHLAEIEDMPLFEPRVFTAGSEERVTCLPPKGLPEPSVWWEHAGVRLPTHGRVYQKGHELVLANIAESDAGVYTCHAANLAGQRRQDVNITVATVPSWLKKPQDSQLEEGKPGYLDCLTQATPKPTVVWYRNQMLISEDSRFEVFKNGTLRINSVEVYDGTWYRCMSSTPAGSIEAQARVQVLEKLKFTPPPQPQQCMEFDKEATVPCSATGREKPTIKWERADGSSLPEWVTDNAGTLHFARVTRDDAGNYTCIASNGPQGQIRAHVQLTVAVFITFKVEPERTTVYQGHTALLQCEAQGDPKPLIQWKGKDRILDPTKLGPRMHIFQNGSLVIHDVAPEDSGRYTCIAGNSCNIKHTEAPLYVVDKPVPEESEGPGSPPPYKMIQTIGLSVGAAVAYIIAVLGLMFYCKKRCKAKRLQKQPEGEEPDMECLNGGPLQNGQPSAEIQEEVALTSLGSGPAATNKRHSTSDKMHFPRSSLQPITTLGKSEFGEVFLAKAQGLEEGVAETLVLVKSLQSKDEQQQLDFRRELEMFGKLNHANVVRLLGLCREAEPHYMVLEYVDLGDLKQFLRISKSKDEKLKSQPLSTKQKVALCTQVALGMEHLSNNRFVHKDLAARNCLVSAQRQVKVSALGLSKDVYNSEYYHFRQAWVPLRWMSPEAILEGDFSTKSDVWAFGVLMWEVFTHGEMPHGGQADDEVLADLQAGKARLPQPEGCPSKLYRLMQRCWALSPKDRPSFSEIASALGDSTVDSKP

SEQ ID NO: 553 - protein, 1070 aa, Homo sapiens
MGAARGSPARPRRLPLLSVLLLPLLGGTQTAIVFIKQPSSQDALQGRRALLRCEVEAPGPVHVYWLLDGAPVQDTERRFAQGSSLSFAAVDRLQDSGTFQCVARDDVTGEEARSANASFNIKWIEAGPVVLKHPASEAEIQPQTQVTLRCHIDGHPRPTYQWFRDGTPLSDGQSNHTVSSKERNLTLRPAGPEHSGLYSCCAHSAFGQACSSQNFTLSIADESFARVVLAPQDVVVARYEEAMFHCQFSAQPPPSLQWLFEDETPITNRSRPPHLRRATVFANGSLLLTQVRPRNAGIYRCIGQGQRGPPIILEATLHLAEIEDMPLFEPRVFTAGSEERVTCLPPKGLPEPSVWWEHAGVRLPTHGRVYQKGHELVLANIAESDAGVYTCHAANLAGQRRQDVNITVATVPSWLKKPQDSQLEEGKPGYLDCLTQATPKPTVVWYRNQMLISEDSRFEVFKNGTLRINSVEVYDGTWYRCMSSTPAGSIEAQARVQVLEKLKFTPPPQPQQCMEFDKEATVPCSATGREKPTIKWERADGSSLPEWVTDNAGTLHFARVTRDDAGNYTCIASNGPQGQIRAHVQLTVAVFITFKVEPERTTVYQGHTALLQCEAQGDPKPLIQWKGKDRILDPTKLGPRMHIFQNGSLVIHDVAPEDSGRYTCIAGNSCNIKHTEAPLYVVDKPVPEESEGPGSPPPYKMIQTIGLSVGAAVAYIIAVLGLMFYCKKRCKAKRLQKQPEGEEPEMECLNGGPLQNGQPSAEIQEEVALTSLGSGPVATNKRHSTSDKMHFPRSSLQPITTLGKSEFGEVFLAKAQGLEEGVAETLVLVKSLQSKDEQQQLDFRRELEMFGKLNHANVVRLLGLCREAEPHYMVLEYVDLGDLKQFLRISKSKDEKLKSQPLSTKQKVALCTQVALGMEHLSNNRFVHKDLAARNCLVSAQRQVKVSALGLSKDVYNSEYYHFRQAWVPLRWMSPEAILEGDFSTKSDVWAFGVLMWEVFTHGEMPHGGQADDEVLADLQAGKARLPQPEGCPSKLYRLMQRCWALSPKDRPSFSEIASALGDSTVDSKP

SEQ ID NO: 554 - protein, 1070 aa, Homo sapiens
MGAARGSPARPRRLPLLSVLLLPLLGGTQTAIVFIKQPSSQDALQGRRALLRCEVEAPGPVHVYWLLDGAPVQDTERRFAQGSSLSFAAVDRLQDSGTFQCVARDDVTGEEARSANASFNIKWIEAGPVVLKHPASEAEIQPQTQVTLRCHIDGHPRPTYQWFRDGTPLSDGQSNHTVSSKERNLTLRPAGPEHSGLYSCCAHSAFGQACSSQNFTLSIADESFARVVLAPQDVVVARYEEAMFHCQFSAQPPPSLQWLFEDETPITNRSRPPHLRRATVFANGSLLLTQVRPRNAGIYRCIGQGQRGPPIILEATLHLAEIEDMPLFEPRVFTAGSEERVTCLPPKGLPEPSVWWEHAGVRLPTHGRVYQKGHELVLANIAESDAGVYTCHAANLAGQRRQDVNITVATVPSWLKKPQDSQLEEGKPGYLDCLTQATPKPTVVWYRNQMLISEDSRFEVFKNGTLRINSVEVYDGTWYRCMSSTPAGSIEAQARVQVLEKLKFTPPPQPQQCMEFDKEATVPCSATGREKPTIKWERADGSSLPEWVTDNAGTLHFARVTRDDAGNYTCIASNGPQGQIRAHVQLTVAVFITFKVEPERTTVYQGHTALLQCEAQGDPKPLIQWKGKDRILDPTKLGPRMHIFQNGSLVIHDVAPEDSGRYTCIAGNSCNIKHTEAPLYVVDKPVPEESEGPGSPPPYKMIQTIGLSVGAAVAYIIAVLGLMFYCKKRCKAKRLQKQPEGEEPEMECLNGGPLQNGQPSAEIQEEVALTSLGSGPAATNKRHSTSDKMHFPRSRLQPITTLGKSEFGEVFLAKAQGLEEGVAETLVLVKSLQSKDEQQQLDFRRELEMFGKLNHANVVRLLGLCREAEPHYMVLEYVDLGDLKQFLRISKSKDEKLKSQPLSTKQKVALCTQVALGMEHLSNNRFVHKDLAARNCLVSAQRQVKVSALGLSKDVYNSEYYHFRQAWVPLRWMSPEAILEGDFSTKSDVWAFGVLMWEVFTHGEMPHGGQADDEVLADLQAGKARLPQPEGCPSKLYRLMQRCWALSPKDRPSFSEIASALGDSTVDSKP

SEQ ID NO: 555 - protein, 972 aa, Homo sapiens [sequence omitted]

SEQ ID NO: 556 - protein, 1210 aa, Homo sapiens [sequence omitted]

SEQ ID NO: 557 - protein, 976 aa, Homo sapiens [sequence omitted]

SEQ ID NO: 558 - protein, 976 aa, Homo sapiens
MERRWPLGLGLVLLLCAPLPPGARAKEVTLMDTSKAQGELGWLLDPPKDGWSEQQQILNGTPLYMYQDCPMQGRRDTDHWLRSNWIYRGEEASRVHVELQFTVRDCKSFPGGAGPLGCKETFNLLYMESDQDVGIQLRRPLFQKVTTVAADQSFTIRDLASGSVKLNVERCSLGRLTRRGLYLAFHNPGACVALVSVRVFYQRCPETLNGLAQFPDTLPGPAGLVEVAGTCLPHARASPRPSGAPRMHCSPDGEWLVPVGRCHCEPGYEEGGSGEACVACPSGSYRMDMDTPHCLTCPQQSTAESEGATICTCESGHYRAPGEGPQVACTGPPSAPRNLSFSASGTQLSLRWEPPADTGGRQDVRYSVRCSQCQGTAQDGGPCQPCGVGVHFSPGARGLTTPAVHVNGLEPYANYTFNVEAQNGVSGLGSSGHASTSVSISMGHAESLSGLSLRLVKKEPRQLELTWAGSRPRSPGANLTYELHVLNQDEERYQMVLEPRVLLTELQPDTTYIVRVRMLTPLGPGPFSPDHEFRTSPPVSRGLTGGEIVAVIFGLLLGAALLLGILVFRSRRAQRQRQQRQRDRATDVDREDKLWLKPYVDLQAYEDPAQGALDFTRELDPAWLMVDTVIGEGEFGEVYRGTLRLPSQDCKTVAIKTLKDTSPGGQWWNFLREATIMGQFSHPHILHLEGVVTKRKPIMIITEFMENGALDAFLREREDQLVPGQLVAMLQGIASGMNYLSNHNYVHRDLAARNILVNQNLCCKVSDFGLTRLLDDFDGTYETQGGKIPIRWTAPEAIAHRIFTTASDVWSFGIVMWEVLSFGDKPYGEMSNQEVMKSIEDGYRLPPPVDCPAPLYELMKNCWAYDRARRPHFQKLQAHLEQLLANPHSLRTIANFDPRMTLRLPSLSGSDGIPYRTVSEWLESIRMKRYILHFHSAGLDTMECVLELTAEDLTQMGITLPGHQKRILCSIQGFKD

SEQ ID NO: 559 - protein, 976 aa, Homo sapiens
MERRWPLGLGLVLLLCAPLPPGARAKEVTLMDTSKAQGELGWLLDPPKDGWSEQQQILNGTPLYMYQDCPMQGRRDTDHWLRSNWIYRGEEASRVHVELQFTVRDCKSFPGGAGPLGCKETFNLLYMESDQDVGIQLRRPLFQKVTTVAADQSFTIRDLASGSVKLNVERCSLGRLTRRGLYLAFHNPGACVALVSVRVFYQRCPETLNGLAQFPDTLPGPAGLVEVAGTCLPHARASPRPSGAPRMHCSPDGEWLVPVGRCHCEPGYEEGGSGEACVACPSGSYRMDMDTPHCLTCPQQSTAESEGATICTCESGHYRAPGEGPQVACTGPPSAPRNLSFSASGTQLSLRWEPPADTGGRQDVRYSVRCSQCQGTAQDGGPCQPCGVGVHFSPGARGLTTPAVHVNGLEPYANYTFNVEAQNGVSGLGSSGHASTSVSISMGHAESLSGLSLRLVKKEPRQLELTWAGSRPRSPGANLTYELHVLNQDEERYQMVLEPRVLLTELQPDTTYIVRVRMLTPLGPGPFSPDHEFRTSPPVSRGLTGGEIVAVIFGLLLGAALLLGILVFRSRRAQRQRQQRQRDRATDVDREDKLWLKPYVDLQAYEDPAQGALDFTRELDPAWLMVDTVIGEGEFGEVYRGTLRLPSQDCKTVAIKTLKDTSPGGQWWNFLREATIMGQFSHPHILHLEGVVTKRKPIMIITEFMENGALDAFLREREDQLVPGQLVAMLQGIASGMNYLSNHNYVHRDLAARNILVNQNLCCKVSDFGLTRLLDDFDGTYETQGGKIPIRWTAPEAIAHRIFTTASDVWSFGIVMWEVLSFGDKPYGEMSNQEVMKSIEDGYRLPPPVDCPAPLYELMKNCWAYDRARRPHFQKLQAHLEQLLANPHSLRTIANFDPRVTLRLPSLSGSDGIPYRTVSEWLESIRMKRYILHFHLAGLDTMECVLELTAEDLTQMGITLPGHQKRILCSIQGFKD

SEQ ID NO: 560 - protein, 1008 aa, Homo sapiens
METCAGPHPLRLFLCRMQLCLALLLGPWRPGTAEEVILLDSKASQAELGWTALPSNGWEEISGVDEHDRPIRTYQVCNVLEPNQDNWLQTGWISRGRGQRIFVELQFTLRDCSSIPGAAGTCKETFNVYYLETEADLGRGRPRLGGSRPRKIDTIAADESFTQGDLGERKMKLNTEVREIGPLSRRGFHLAFQDVGACVALVSVRVYYKQCRATVRGLATFPATAAESAFSTLVEVAGTCVAHSEGEPGSPPRMHCGADGEWLVPVGRCSCSAGFQERGDFCEACPPGFYKVSPRRPLCSPCPEHSRALENASTFCVCQDSYARSPTDPPSASCTRPPSAPRDLQYSLSRSPLVLRLRWLPPADSGGRSDVTYSLLCLRCGREGPAGACEPCGPRVAFLPRQAGLRERAATLLHLRPGARYTVRVAALNGVSGPAAAAGTTYAQVTVSTGPGAPWEEGEIRRDRVEPQSVSLSWREPIPAGAPGANDTEYEIRYYEKGQSEQAYSMVKTGAPTVTVTNLKPATRYVFQIRAASPGPSWEAQSFNPSIEVQTLGEAASGSRDQSPAIVVTVVTISALLVLGSVMSVLAIWRRPCSYGKGGGDAHDEEELYFHFKVPTRRTFLDPQSCGDPLQAVHLFAKELDAKSVTLERSLGGGRFGELCCGCLQLPGRQELLVAVHMLRDSASDSQRLGFLAEALTLGQFDHSHIVRLEGVVTRGSTLMIVTEYMSHGALDGFLRRHEGQLVAGQLMGLLPGLASAMKYLSEMGYVHRGLAARHVLVSSDLVCKISGFGRGPRDRSEAVYTTMSGRSPALWAAPETLQFGHFSSASDVWSFGIIMWEVMAFGERPYWDMSGQDVIKAVEDGFRLPPPRNCPNLLHRLMLDCWQKDPGERPRFSQIHSILSKMVQDPEPPKCALTTCPRPPTPLADRAFSTFPSFGSVGAWLEALDLCRYKDSFAAAGYGSLEAVAEMTAQDLVSLGISLAEHREALLSGISALQARVLQLQGQGVQV

SEQ ID NO: 561 - protein, 1008 aa, Homo sapiens
METCAGPHPLRLFLCRMQLCLALLLGPWRPGTAEEVILLDSKASQAELGWTALPSNGWEEISGVDEHDRPIRTYQVCNVLEPNQDNWLQTGWISRGRGQRIFVELQFTLRDCSSIPGAAGTCKETFNVYYLETEADLGRGRPRLGGSRPRKIDTIAADESFTQGDLGERKMKLNTEVREIGPLSRRGFHLAFQDVGACVALVSVRVYYKQCRATVRGLATFPATAAESAFSTLVEVAGTCVAHSEGEPGSPPRMHCGADGEWLVPVGRCSCSAGFQERGDFCEACPPGFYKVSPRRPLCSPCPEHSRALENASTFCVCQDSYARSPTDPPSASCTRPPSAPRDLQYSLSRSPLVLRLRWLPPADSGGRSDVTYSLLCLRCGREGPAGACEPCGPRVAFLPRQAGLRERAATLLHLRPGARYTVRVAALNGVSGPAAAAGTTYAQVTVSTGPGAPWEEGEIRRDRVEPQSVSLSWREPIPAGAPGANDTEYEIRYYEKGQSEQAYSMVKTGAPTVTVTNLKPATRYVFQIRAASPGPSWEAQSFNPSIEVQTLGEAASGSRDQSPAIVVTVVTISALLVLGSVMSVLAIWRRPCSYGKGGGDAHDEEELYFHFKVPTRRTFLDPQSCGDLLQAVHLFAKELDAKSITLERSLGGGRFGELCCGCLQLPGRQELLVAVHMLRDSASDSQRLGFLAEALTLGQFDHSHIVRLEGVVTRGSTLMIVTEYMSHGALDGFLRRHEGQLVAGQLMGLLPGLASAMKYLSEMGYVHRGLAARHVLVSSDLVCKISGFGRGPRDRSEAVYTTMSGRSPALWAAPETLQFGHFSSASDVWSFGIIMWEVMAFGERPYWDMSGQDVIKAVEDGFRLPPPRNCPNLLHRLMLDCWQKDPGERPRFSQIHSILSKMVQDPEPPKCALTTCPRPPTPLADRAFSTFPSFGSVGAWLEALDLCRYKDSFAAAGYGSLEAVAEMTAQDLVSLGISLAEHREALLSGISALQARVLQLQGQGVQV

SEQ ID NO: 562 - protein, 1008 aa, Homo sapiens
METCAGPHPLRLFLCRMQLCLALLLGPWRPGTAEEVILLDSKASQAELGWTALPSNGWEEISGVDEHDRPIRTYQVCNVLEPNQDNWLQTGWISRGRGQRIFVELQFTLRDCSSIPGAAGTCKETFNVYYLETEADLGRGRPRLGGSRPRKIDTIAADESFTQGDLGERKMKLNTEVREIGPLSRRGFHLAFQDVGACVALVSVRVYYKQCRATVRGLATFPATAAESAFSTLVEVAGTCVAHSEGEPGSPPRMHCGADGEWLVPVGRCSCSAGFQERGDFCEACPPGFYKVSPRRPLCSPCPEHSRALENASTFCVCQDSYARSPTDPPSASCTRPPSAPRDLQYSLSRSPLVLRLRWLPPADSGGRSDVTYSLLCLRCGREGPAGACEPCGPRVAFLPRQAGLRERAATLLHLRPGARYTVRVAALNGVSGPAAAAGTTYAQVTVSTGPGAPWEEGEIRRDRVEPQSVSLSWREPIPAGAPGANDTEYEIRYYEKGQSEQAYSMVKTGAPTVTVTNLKPATRYVFQIRAASPGPSWEAQSFNPSIEVQTLGEAASGSRDQSPAIVVTVVTISALLVLGSVMSVLAIWRRPCSYGKGGGDAHDEEELYFHFKVPTRRTFLDPQSCGDLLQAVHLFAKELDAKSVTLERSLGGGRFGELCCGCLQLPGRQELLVAVHMLRDSASDSQRLGFLAEALTLGQFDHSHIVRLEGVVTRGSTLMIVTEYMSHGALDGFLRRHEGQLVAGQLMELLPGLASAMKYLSEMGYVHRGLAARHVLVSSDLVCKISGFGRGPRDRSEAVYTTMSGRSPALWAAPETLQFGHFSSASDVWSFGIIMWEVMAFGERPYWDMSGQDVIKAVEDGFRLPPPRNCPNLLHRLMLDCWQKDPGERPRFSQIHSILSKMVQDPEPPKCALTTCPRPPTPLADRAFSTFPSFGSVGAWLEALDLCRYKDSFAAAGYGSLEAVAEMTAQDLVSLGISLAEHREALLSGISALQARVLQLQGQGVQV

SEQ ID NO: 563 - protein, 976 aa, Homo sapiens [sequence omitted]

SEQ ID NO: 564 - protein, 983 aa, Homo sapiens
MDCQLSILLLLSCSVLDSFGELIPQPSNEVNLLDSKTIQGELGWISYPSHGWEEISGVDEHYTPIRTYQVCNVMDHSQNNWLRTNWVPRNSAQKIYVELKFTLRDCNSIPLVLGTCKETFNLYYMESDDDHGVKFREHQFTKIDTIAADESFTQMDLGDRILKLNTEIREVGPVNKKGFYLAFQDVGACVALVSVRVYFKKCPFTVKNLAMFPDTVPMDSQSLVEVRGSCVNNSKEEDPPRMYCSTEGEWLVPIGKCSCNAGYEERGFMCQACRPGFYKALDGNMKCAKCPPHSSTQEDGSMNCRCENNYFRADKDPPSMACTRPPSSPRNVISNINETSVILDWSWPLDTGGRKDVTFNIICKKCGWNIKQCEPCSPNVRFLPRQFGLTNTTVTVTDLLAHTNYTFEIDAVNGVSELSSPPRQFAAVSITTNQAAPSPVLTIKKDRTSRNSISLSWQEPEHPNGIILDYEVKYYEKQEQETSYTILRARGTNVTISSLKPDTIYVFQIRARTAAGYGTNSRKFEFETSPDSFSISGESSQVVMIAISAAVAIILLTVVIYVLVGRFCGYKSKHGADEKRLHFGNGHLKLPGLRTYVDPHTYEDPTQAVHEFAKELDATNISIDKVVGAGEFGEVCSGRLKLPSKKEISVAIKTLKVGYTEKQRRDFLGEASIMGQFDHPNIIRLEGVVTKSKPVMIVTEYMENGSLDSFLRKHDAQFTVIQLVGMLRGIASGMKYLSDMGYVHRDLAARNILINSNLVCKVSDFGLSRVLEDDPEAAYTTRGGKIPIRWTSPEAIAYRKFTSASDVWSYGIVLWEVMSYGERPYWEMSNQDVIKAVDEGYRLPPPMDCPAALYQLMLDCWQKDRNNRPKFEQIVSILDKLIRNPGSLKIITSAAARPSNLLLDQSNVDITTFRTTGDWLNGVWTAHCKEIFTGVEYSSCDTIAKISTDDMKKVGVTVVGPQKKIISSIKALETQSKNGPVPV

SEQ ID NO: 565 - protein, 983 aa, Homo sapiens
MDCQLSILLLLSCSVLDSFGELIPQPSNEVNLLDSKTIQGELGWISYPSHGWEEISGVDEHYTPIRTYQVCNVMDHSQNNWLRTNWVPRNSAQKIYVELKFTLRDCNSIPLVLGTCKETFNLYYMESDDDHGVKFREHQFTKIDTIAADESFTQMDLGDRILKLNTEIREVGPVNKKGFYLAFQDVGACVALVSVRVYFKKCPFTVKNLAMFPDTVPMDSQSLVEVRGSCVNNSKEEDPPRMYCSTEGEWLVPIGKCSCNAGYEERGFMCQACRPGFYKALDGNMKCAKCPPHSSTQEDGSMNCRCENNYFRADKDPPSMACTRPPSSPRNVISNINETSVILDWSWPLDTGGRKDVTFNIICKKCGWNIKQCEPCSPNVRFLPRQFGLTNTTVTVTDLLAHTNYTFEIDAVNGVSELSSPPRQFAAVSITTNQAAPSPVLTIKKDRTSRNSISLSWQEPEHPNGIILDYEVKYYEKQEQETSYTILRARGTNVTISSLKPDTIYVFQIRARTAAGYGTNSRKFEFETSPDSFSISGESSQVVMIAISAAVAIILLTVVIYVLIGRFCGYKSKHGADEKRLHFGNGHLKLPGLRTYVDPHTYEDPTQAVHEFAKELDATNISIDKVVGAGEFGEVCSGRLKLPSKKEISVAIKTLKVGYTEKQRRDFLGEASIMGQFDHPNIIRLEGVVTKSKPVMIVTEYMENGSLDSFLRKHDAQFTVIQLVGMLRGIASGMKYLSDMGYVHRDLAARNILINSNLVCKVSDFGLSRVLEDDPEAAYTTRGGKIPIRWTSPEAIAYRKFTSASDVWSYGIVLWEVMSYGERPYWEMSNQDVIKAVDEGYRLPPPMDCPAALYQLMLDCWQKDRNNRPKFEQIVSILDKLIRNPGSLKIITSAAARPSNLLLDQSNVDITTFHTTGDWLNGVWTAHCKEIFTGVEYSSCDTIAKISTDDMKKVGVTVVGPQKKIISSIKALETQSKNGPVPV

SEQ ID NO: 566 - protein, 983 aa, Homo sapiens [sequence omitted]

SEQ ID NO: 567 - protein, 998 aa, Homo sapiens
MVFQTRYPSWIILCYIWLLRFAHTGEAQAAKEVLLLDSKAQQTELEWISSPPNGWEEISGLDENYTPIRTYQVCQVMEPNQNNWLRTNWISKGNAQRIFVELKFTLRDCNSLPGVLGTCKETFNLYYYETDYDTGRNVRENLYVKIDTIAADESFTQGDLGERKMKLNTEVREIGPLSKKGFYLAFQDVGACIALVSVKVYYKKCWSIIENLAIFPDTVTGSEFSSLVEVRGTCVSSAEEEAENAPRMHCSAEGEWLVPIGKCICKAGYQQKGDTCEPCGRGFYKSSSQDLQCSRCPTHSFSDKEGSSRCECEDGYYRAPSDPPYVACTRPPSAPQNLIFNINQTTVSLEWSPPADNGGRNDVTYRILCKRCSWEQGECVPCGSNIGYMPQQTGLEDNYVTVMDLLAHANYTFEVEAVNGVSDLSRSQRLFAAVSITTGQAAPSQVSGVMKERVLQRSVELSWQEPEHPNGVITEYEIKYYEKDQRERTYSTVKTKSTSASINNLKPGTVYVFQIRAFTAAGYGNYSPRLDVATLEEATGKMFEATAVSSEQNPVIIIAVVAVAGTIILVFMVFGFIIGRRHCGYSKADQEGDEELYFHFKFPGTKTYIDPETYEDPNRAVHQFAKELDASCIKIERVIGAGEFGEVCSGRLKLPGKRDVAVAIKTLKVGYTEKQRRDFLCEASIMGQFDHPNVVHLEGVVTRGKPVMIVIEFMENGALDAFLRKHDGQFTVIQLVGMLRGIAAGMRYLADMGYVHRDLAARNILVNSNLVCKVSDFGLSRVIEDDPEAVYTTTGGKIPVRWTAPEAIQYRKFTSASDVWSYGIVMWEVMSYGERPYWDMSNQDVIKAIEEGYRLPAPMDCPAGLHQLMLDCWQKERAERPKFEQIVGILDKMIRNPNSLKTPLGTCSRPISPLLDQNTPDFTTFCSVGEWLQAIKMERYKDNFTAAGYNSLESVARMTIEDVMSLGITLVGHQKKIMSSIQTMRAQMLHLHGTGIQV

SEQ ID NO: 568 - protein, 986 aa, Homo sapiens
MALRRLGAALLLLPLLAAVEETLMDSTTATAELGWMVHPPSGWEEVSGYDENMNTIRTYQVCNVFESSQNNWLRTKFIRRRGAHRIHVEMKFSVRDCSSIPSVPGSCKETFNLYYYEADFDSATKTFANWMENPWVKVDTIAADESFSQVDLGGRVMKINTEVRSFGPVSRSGFYLAFQDYGGCMSLIAVRVFYRKCPRIIQNGAIFQETLSGAESTSLVAARGSCIANAEEVDVPIKLYCNGDGEWLVPIGRCMCKAGFEAVENGTVCRGCPSGTFKANQGDEACTHCPINSRTTSEGATNCVCRNGYYRADLDPLDMPCTTIPSAPQAVISSVNETSLMLEWTPPRDSGGREDLVYNIICKSCGSGRGACTRCGDNVQYAPRQLGLTEPRIYISDLLAHTQYTFEIQAVNGVTDQSPFSPQFASVNITTNQAAPSAVSIMHQVSRTVDSITLSWSQPDQPNGVILDYELQYYEKELSEYNATAIKSPTNTVTVQGLKAGAIYVFQVRARTVAGYGRYSGKMYFQTMTEAEYQTSIQEKLPLIIGSSAAGLVFLIAVVVIAIVCNRRGFERADSEYTDKLQHYTSGHMTPGMKIYIDPFTYEDPNEAVREFAKEIDISCVKIEQVIGAGEFGEVCSGHLKLPGKREIFVAIKTLKSGYTEKQRRDFLSEASIMGQFDHPNVIHLEGVVTKSTPVMIITEFMENGSLDSFLRQNDGQFTVIQLVGMLRGIAAGMKYLADMNYVHRDLAARNILVNSNLVCKVSDFGLSRFLEDDTSDPTYTSALGGKIPIRWTAPEAIQYRKFTSASDVWSYGIVMWEVMSYGERPYWDMTNQDVINAIEQDYRLPPPMDCPSALHQLMLDCWQKDRNHRPKFGQIVNTLDKMIRNPNSLKAMAPLSSGINLPLLDRTIPDYTSFNTVDEWLEAIKMGQYKESFANAGFTSFDVVSQMMMEDILRVGVTLAGHQKKILNSIQVMRAQMNQIQSVEV

SEQ ID NO: 569 - protein, 998 aa, Homo sapiens
MARARPPPPPSPPPGLLPLLPPLLLLPLLLLPAGCRALEETLMDTKWVTSELAWTSHPESGWEEVSGYDEAMNPIRTYQVCNVRESSQNNWLRTGFIWRRDVQRVYVELKFTVRDCNSIPNIPGSCKETFNLFYYEADSDVASASSPFWMENPYVKVDTIAPDESFSRLDAGRVNTKVRSFGPLSKAGFYLAFQDQGACMSLISVRAFYKKCASTTAGFALFPETLTGAEPTSLVIAPGTCIPNAVEVSVPLKLYCNGDGEWMVPVGACTCATGHEPAAKESQCRPCPPGSYKAKQGEGPCLPCPPNSRTTSPAASICTCHNNFYRADSDSADSACTTVPSPPRGVISNVNETSLILEWSEPRDLGGRDDLLYNVICKKCHGAGGASACSRCDDNVEFVPRQLGLTERRVHISHLLAHTRYTFEVQAVNGVSGKSPLPPRYAAVNITTNQAAPSEVPTLRLHSSSGSSLTLSWAPPERPNGVILDYEMKYFEKSEGIASTVTSQMNSVQLDGLQPDARYVVQVRARTVAGYGQYSRPAEFETTSERGSGAQQLQEQLPLIVGSATAGLVFVVAVVVIAIVCLRKQRHGSDSEYTEKLQQYIAPGMKVYIDPFTYEDPNEAVREFAKEIDVSCVKIEEVIGAGEFGEVCRGRLKQPGRREVFVAIKTLKVGYTERQRRDFLSEASIMGQFDHPNIIRLEGVVTKSRPVMILTEFMENCALDSFLRLNDGQFTVIQLVGMLRGIAAGMKYLSEMNYVHRDLAARNILVNSNLVCKVSDFGLSRFLEDDPSDPTYTSSLGGKIPIRWTAPEAIAYRKFTSASDVWSYGIVMWEVMSYGERPYWDMSNQDVINAVEQDYRLPPPMDCPTALHQLMLDCWVRDRNLRPKFSQIVNTLDKLIRNAASLKVIASAQSGMSQPLLDRTVPDYTTFTTVGDWLDAIKMGRYKESFVSAGFASFDLVAQMTAEDLLRIGVTLAGHQKKILSSIQDMRLQMNQTLPVQV

SEQ ID NO: 570 - protein, 1006 aa, Homo sapiens
MVCSLWVLLLVSSVLALEEVLLDTTGETSEIGWLTYPPGGWDEVSVLDDQRRLTRTFEACHVAGAPPGTGQDNWLQTHFVERRGAQRAHIRLHFSVRACSSLGVSGSTCRETFTLYYRQAEEPDSPDSVSSWHLKRWTKVDTIAADESFPSSSSSSSSSSSAAWAVGPHGAGQRAGLQLNVKERSFGPLTQRGFYVAFQDTGACLALVAVRLFSYTCPAVLRSFASFPETQASGAGGASLVAAVGTCVAHAEPEEDGVGGQAGGSPPRLHCNGEGKWMVAVGGCRCQPGYQPARGDKACQACPRGLYKSSAGNAPCSPCPARSHAPNPAAPVCPCLEGFYRASSDPPEAPCTGPPSAPQELWFEVQGSALMLHWRLPRELGGRGDLLFNVVCKECEGRQEPASGGGGTCHRCRDEVHFDPRQRGLTESRVLVGGLRAHVPYILEVQAVNGVSELSPDPPQAAAINVSTSHEVPSAVPVVHQVSRASNSITVSWPQPDQTNGNILDYQLRYYDQAEDESHSFTLTSETNTATVTQLSPGHIYGFQVRARTAAGHGPYGGKVYFQTLPQGELSSQLPERLSLVIGSILGALAFLLLAAITVLAVVFQRKRRGTGYTEQLQQYSSPGLGVKYYIDPSTYEDPCQAIRELAREVDPAYIKIEEVIGTGSFGEVRQGRLQPRGRREQTVAIQALWAGGAESLQMTFLGRAAVLGQFQHPNILRLEGVVTKSRPLMVLTEFMELGPLDSFLRQREGQFSSLQLVAMQRGVAAAMQYLSSFAFVHRSLSAHSVLVNSHLVCKVARLGHSPQGPSCLLRWAAPEVIAHGKHTTSSDVWSFGILMWEVMSYGERPYWDMSEQEVLNAIEQEFRLPPPPGCPPGLHLLMLDTWQKDRARRPHFDQLVAAFDKMIRKPDTLQAGGDPGERPSQALLTPVALDFPCLDSPQAWLSAIGLECYQDNFSKFGLCTFSDVAQLSLEDLPALGITLAGHQKKLLHHIQLLQQHLRQQGSVEV

SEQ ID NO: 571 - protein, 1006 aa, Homo sapiens
MVCSLWVLLLVSSVLALEEVLLDTTGETSEIGWLTYPPGGWDEVSVLDDQRRLTRTFEACHVAGAPPGTGQDNWLQTHFVERRGAQRAHIRLHFSVRACSSLGVSGGTCRETFTLYYRQAEEPDSPDSVSSWHLKRWTKVDTIAADESFPSSSSSSSSSSSAAWAVGPHGAGQRAGLQLNVKERSFGPLTQRGFYVAFQDTGACLALVAVRLFSYTCPAVLRSFASFPETQASGAGGASLVAAVGTCVAHAEPEEDGVGGQAGGSPPRLHCNGEGKWMVAVGGCRCQPGYQPARGDKACQACPRGLYKASAGNAPCSPCPARSHAPNPAAPVCPCLEGFYRASSDPPEAPCTGPPSAPQELWFEVQGSALMLHWRLPRELGGRGDLLFNVVCKECEGRQEPASGGGGTCHRCRDEVHFDPRQRGLTESRVLVGGLRAHVPYILEVQAVNGVSELSPDPPQAAAINVSTSHEVPSAVPVVHQVSRASNSITVSWPQPDQTNGNILDYQLRYYDQAEDESHSFTLTSETNTATVTQLSPGHIYGFQVRARTAAGHGPYGGKVYFQTLPQGELSSQLPERLSLVIGSILGALAFLLLAAITVLAVVFQRKRRGTGYTEQLQQYSSPGLGVKYYIDPSTYEDPCQAIRELAREVDPAYIKIEEVIGTGSFGEVRQGRLQPRGRREQTVAIQALWAGGAESLQMTFLGRAAVLGQFQHPNILRLEGVVTKSRPLMVLTEFMELGPLDSFLRQREGQFSSLQLVAMQRGVAAAMQYLSSFAFVHRSLSAHSVLVNSHLVCKVARLGHSPQGPSCLLRWAAPEVIAHGKHTTSSDVWSFGILMWEVMSYGERPYWDMSEQEVLNAIEQEFRLPPPPGCPPGLHLLMLDTWQKDRARRPHFDQLVAAFDKMIRKPDTLQAGGDPGERPSQALLTPVALDFPCLDSPQAWLSAIGLECYQDNFSKFGLCTFSDVAQLSLEDLPALGITLAGHQKKLLHHIQLLQQHLRQQGSVEV

SEQ ID NO: 572 - protein, 415 aa, Homo sapiens
MISADCNLCLPEYDRYLASSKIMAAAYLDPNLNHTPNSSTKTHLGTGMERSPGAMERVLKVFHYFESNSEPTTWASIIRHGDATDVRGIIQKIVDSHKVKHVACYGFRLSHLRSEEVHWLHVDMGVSSVREKYELAHPPEEWKYELRIRYLPKGFLNQFTEDKPTLNFFYQQVKSDYMLEIADQVDQEIALKLGCLEIRRSYWEMRGNALEKKSNYEVLEKDVGLKRFFPKSLLDSVKAKTLRKLIQQTFRQFANLNREESILKFFEILSPVYRFDKECFKCALGSSWIISVELAIGPEEGISYLTDKGCNPTHLADFTQVQTIQYSNSEDKDRKGMLQLKIAGAPEPLTVTAPSLTIAENMADLIDGYCRLVNGTSQSFIIRPQKEGERALPSIPKLANSEKQGMRTHAVSVSE

SEQ ID NO: 573 - protein, 1077 aa, Homo sapiens
MISADCNLCLPEYDRYLASSKIMAAAYLDPNLNHTPNSSTKTHLGTGMERSPGAMERVLKVFHYFESNSEPTTWASIIRHGDATDVRGIIQKIVDSHKVKHVACYGFRLSHLRSEEVHWLHVDMGVSSVREKYELAHPPEEWKYELRIRYLPKGFLNQFTEDKPTLNFFYQQVKSDYMLEIADQVDQEIALKLGCLEIRRSYWEMRGNALEKKSNYEVLEKDVGLKRFFPKSLLDSVKAKTLRKLIQQTFRQFANLNREESILKFFEILSPVYRFDKECFKCALGSSWIISVELAIGPEEGISYLTDKGCNPTHLADFTQVQTIQYSNSEDKDRKGMLQLKIAGAPEPLTVTAPSLTIAENMADLIDGYCRLVNGTSQSFIIRPQKEGERALPSIPKLANSEKQGMRTHAVSVSETDDYAEIIDEEDTYTMPSTRDYEIQRERIELGRCIGEGQFGDVHQGIYMSPENPALAVAIKTCKNCTSDSVREKFLQEALTMRQFDHPHIVKLIGVITENPVWIIMELCTLGELRSFLQVRKYSLDLASLILYAYQLSTALAYLESKRFVHRDIAARNVLVSSNDCVKLGDFGLSRYMEDSTYYKASKGKLPIKWMAPESINFRRFTSASDVWMFGVCMWEILMHGVKPFQGVKNNDVIGRIENGERLPMPPNCPPTLYSLMTKCWAYDPSRRPRFTELKAQLSTILEEEKAQQEERMRMESRRQATVSWDSGGSDEAPPKPSRPGYPSPRSSEGFYPSPQHMVQTNHYQVSGYPGSHGITAMAGSIYPGQASLLDQTDSWNHRPQEIAMWQPNVEDSTVLDLRGIGQVLPTHLMEERLIRQQQEMEEDQRWLEKEERFLKPDVRLSRGSIDREDGSLQGPIGNQHIYQPVGKPDPAAPPKKPPRPGAPGHLGSLASLSSPADSYNEGVKPWRLQPQEISPPPTANLDRSNDKVYENVTGLVKAVIEMSSKIQPAPPEEYVPMVKEVGLALRTLLATVDETIPLLPASTHREIEMAQKLLNSDLGELINKMKLAQQYVMTSLQQEYKKQMLTAAHALAVDAKNLLDVIDQARLKMLGQTRPH

SEQ ID NO: 574 - protein, 764 aa, Homo sapiens
MGFSSELCSPQGHGVLQQMQEAELRLLEGMRKWMAQRVKSDREYAGLLHHMSLQDSGGQSRAISPDSPISQTHSQDIEKLKSQYRALARDSAQAKRKYQEASKDKDRDKAKDKYVRSLWKLFAHHNRYVLGVRAAQLHHQHHHQLLLPGLLRSLQDLHEEMACILKEILQEYLEISSLVQDEVVAIHREMAAAAARIQPEAEYQGFLRQYGSAPDVPPCVTFDESLLEEGEPLEPGELQLNELTVESVQHTLTSVTDELAVATEMVFRRQEMVTQLQQELRNEEENTHPRERVQLLGKRQVLQEALQGLQVALCSQAKLQAQQELLQTKLEHLGPGEPPPVLLLQDDRHSTSSSEQEREGGRTPTLEILKSHISGIFRPKFSLPPPLQLIPEVQKPLHEQLWYHGAIPRAEVAELLVHSGDFLVRESQGKQEYVLSVLWDGLPRHFIIQSLDNLYRLEGEGFPSIPLLIDHLLSTQQPLTKKSGVVLHRAVPKDKWVLNHEDLVLGEQIGRGNFGEVFSGRLRADNTLVAVKSCRETLPPDLKAKFLQEARILKQYSHPNIVRLIGVCTQKQPIYIVMELVQGGDFLTFLRTEGARLRVKTLLQMVGDAAAGMEYLESKCCIHRDLAARNCLVTEKNVLKISDFGMSREEADGVYAASGGLRQVPVKWTAPEALNYGRYSSESDVWSFGILLWETFSLGASPYPNLSNQQTREFVEKGGRLPCPELCPDAVFRLMEQCWAYEPGQRPSFSTIYQELQSIRKRHR

SEQ ID NO: 575 - protein, 822 aa, Homo sapiens
MGFSSELCSPQGHGVLQQMQEAELRLLEGMRKWMAQRVKSDREYAGLLHHMSLQDSGGQSRAISPDSPISQSWAEITSQTEGLSRLLRQHAEDLNSGPLSKLSLLIRERQQLRKTYSEQWQQLQQELTKTHSQDIEKLKSQYRALARDSAQAKRKYQEASKDKDRDKAKDKYVRSLWKLFAHHNRYVLGVRAAQLHHQHHHQLLLPGLLRSLQDLHEEMACILKEILQEYLEISSLVQDEVVAIHREMAAAAARIQPEAEYQGFLRQYGSAPDVPPCVTFDESLLEEGEPLEPGELQLNELTVESVQHTLTSVTDELAVATEMVFRRQEMVTQLQQELRNEEENTHPRERVQLLGKRQVLQEALQGLQVALCSQAKLQAQQELLQTKLEHLGPGEPRPVLLLQDDRHSTSSSEQEREGGRTPTLEILKSHISGIFRPKFSLPPPLQLIPEVQKPLHEQLWYHGAIPRAEVAELLVHSGDFLVRESQGKQEYVLSVLWDGLPRHFIIQSLDNLYRLEGEGFPSIPLLIDHLLSTQQPLTKKSGVVLHRAVPKDKWVLNHEDLVLGEQIGRGNFGEVFSGRLRADNTLVAVKSCRETLPPDLKAKFLQEARILKQYSHPNIVRLIGVCTQKQPIYIVMELVQGGDFLTFLRTEGARLRVKTLLQMVGDAAAGMEYLESKCCIHRDLAARNCLVTEKNVLKISDFGMSREEADGVYAASGGLRQVPVKWTAPEALNYGRYSSESDVWSFGILLWETFSLGASPYPNLSNQQTREFVEKGGRLPCPELCPDAVFRLMEQCWAYEPGQRPSFSTIYQELQSIRKRHR

SEQ ID NO: 576 - protein, 542 aa, Homo sapiens
MGFSSELCSPQGHGVLQQMQEAELRLLEGMRKWMAQRVKSDREYAGLLHHMSLQDSGGQSRAISPDSPISQSWAEITSQTEGLSRLLRQHAEDLNSGPLSKLSLLIRERQQLRKTYSEQWQQLQQELTKTHSQDIEKLKSQYRALARDSAQAKRKYQEASKDKDRDKAKDKYVRSLWKLFAHHNRYVLGVRAAQLHHQHHHQLLLPGLLRSLQDLHEEMACILKEILQEYLEISSLVQDEVVAIHREMAAAAARIQPEAEYQGFLRQYGSAPDVPPCVTFDESLLEEGEPLEPGELQLNELTVESVQHTLTSVTDELAVATEMVFRRQEMVTQLQQELRNEEENTHPRERVQLLGKRQVLQEALQGLQVALCSQAKLQAQQELLQTKLEHLGPGEPPPVLLLQDDRHSTSSSPGHPLTSVPGLRSRSERGEGHPRWRSLRATSQESSAPSSRSLHRCSSFRRCRSPCMSSCGTTGPSRGQRWLSCWCTLGTSWCGRARASRSTCCRCCGMVCPGTSSSSPWITCTDWKGKAFLAFLCSSTTY

SEQ ID NO: 577 - protein, 820 aa, Homo sapiens
MWSWKCLLFWAVLVTATLCTARPSPTLPEQAQPWGAPVEVESFLVHPGDLLQLRCRLRDDVQSINWLRDGVQLAESNRTRITGEEVEVQDSVPADSGLYACVTSSPSGSDTTYFSVNVSDALPSSEDDDDDDDSSSEEKETDNTKPNRMPVAPYWTSPEKMEKKLHAVPAAKTVKFKCPSSGTPNPTLRWLKNGKEFKPDHRIGGYKVRYATWSIIMDSVVPSDKGNYTCIVENEYGSINHTYQLDVVERSPHRPILQAGLPANKTVALGSNVEFMCKVYSDPQPHIQWLKHIEVNGSKIGPDNLPYVQILKTAGVNTTDKEMEVLHLRNVSFEDAGEYTCLAGNSIGLSHHSAWLTVLEALEERPAVMTSPLYLEIIIYCTGAFLISCMVGSVIVYKMKSGTKKSDFHSQMAVHKLAKSIPLRRQVSADSSASMNSGVLLVRPSRLSSSGTPMLAGVSEYELPEDPRWELPRDRLVLGKPLGEGCFGQVVLAEAIGLDKDKPNRVTKVAVKMLKSDATEKDLSDLISEMEMMKMIGKHKNIINLLGACTQDGPLYVIVEYASKGNLREYLQARRPPGLEYCYNPSHNPEEQLSSKDLVSCAYQVARGMEYLASKKCIHRDLAARNVLVTEDNVMKIADFGLARDIHHIDYYKKTTNGRLPVKWMAPEALFDRIYTHQSDVWSFGVLLWEIFTLGGSPYPGVPVEELFKLLKEGHRMDKPSNCTNELYMMMRDCWHAVPSQRPTFKQLVEDLDRIVALTSNQEYLDLSMPLDQYSPSFPDTRSSTCSSGEDSVFSHEPLPEEPCLPRHPAQLANGGLKRR

SEQ ID NO: 578 - protein, 705 aa, Homo sapiens
MVSWGRFICLVVVTMATLSLARPSFSLVEDTTLEPEGAPYWTNTEKMEKRLHAVPAANTVKFRCPAGGNPTPTMRWLKNGKEFKQEHRIGGYKVRNQHWSLIMESVVPSDKGNYTCVVENEYGSINHTYHLDVVERSPHRPILQAGLPANASTVVGGDVEFVCKVYSDAQPHIQWIKHVEKNGSKYGPDGLPYLKVLKHSGINSSNAEVLALFNVTEADAGEYICKVSNYIGQANQSAWLTVLPKQQAPGREKEITASPDYLEIAIYCIGVFLIACMVVTVILCRMKNTTKKPDFSSQPAVHKLTKRIPLRRQVSAESSSSMNSNTPLVRITTRLSSTADTPMLAGVSEYELPEDPKWEFPRDKLTLGKPLGEGCFGQVVMAEAVGIDKDKPKEAVTVAVKMLKDDATEKDLSDLVSEMEMMKMIGKHKNIINLLGACTQDGPLYVIVEYASKGNLREYLRARRPPGMEYSYDINRVPEEQMTFKDLVSCTYQLARRMEYLASQKCIHRDLAARNVLVTENNVMKIADFGLARDINNIDYYKKTTNGRLPVKWMAPEALFDRVYTHQSDVWSFGVLMWEIFTLGGSPYPGIPVEELFKLLKEGHRMDKPANCTNELYMMMRDCWHAVPSQRPTFKQLVEDLDRILTLTTNEEYLDLSQPLEQYSPSYPDTRSSCSSGDDSVFSPDPMPYEPCLPQYPHINGSVKT

SEQ ID NO: 579 - protein, 705 aa, Homo sapiens
MVSWGRFICLVVVTMATLSLARPSFSLVEDTTLEPEGAPYWTNTEKMEKHSGINSSNAEVLALFNVTEADAGEYICKVSNYIGQANQSAWLTVLPKQQRLHAVPAANTVKFRCPAGGNPMPTMRWLKNGKEFKQEHRIGGYKVRNQHWSLIMESVVPSDKGNYTCVVENEYGSINHTYHLDVVERSPHRPILQAGLPANASTVVGGDVEFVCKVYSDAQPHIQWIKHVEKNGSKYGPDGLPYLKVLKAPGREKEITASPDYLEIAIYCIGVFLIACMVVTVILCRMKNTTKKPDFSSQPAVHKLTKRIPLRRQVSAESSSSMNSNTPLVRITTRLSSTADTPMLAGVSEYELPEDPKWEFPRDKLTLGKPLGEGCFGQVVMAEAVGIDKDKPKEAVTVAVKMLKDDATEKDLSDLVSEMEMMKMIGKHKNIINLLGACTQDGPLYVIVEYASKGNLREYLRARRPPGMEYSYDINRVPEEQMTFKDLVSCTYQLARRMEYLASQKCIHRDLAARNVLVTENNVMKIADFGLARDINNIDYYKKTTNGRLPVKWMAPEALFDRVYTHQSDVWSFGVLMWEIFTLGGSPYPGIPVEELFKLLKEGHRMDKPANCTNELYMMMRDCWHAVPSQRPTFKQLVEDLDRILTLTTNEEYLDLSQPLEQYSPSYPDTRSSCSSGDDSVFSPDPMPYEPCLPQYPHINGSVKT

SEQ ID NO: 580 - protein, 802 aa, Homo sapiens [sequence omitted]

SEQ ID NO: 581 - protein, 802 aa, Homo sapiens
MRLLLALLGVLLSVPGPPVLSLEASEEVELEPCLAPSLEQQEQELTVALGQPVRLCCGRAERGGHWYKEGSRLAPAGRVRGWRGRLEIASFLPEDAGRYLCLARGSMIVLQNLTLITGDSLTSSNDDEDPKSHRDLSNRHSYPQQAPYWTHPQRMEKKLHAVPAGNTVKFRCPAAGNPTPTIRWLKDGQAFHGENRIGGIRLRHQHWSLVMESVVPSDRGTYTCLVENAVGSIRYNYLLDVLERSPHRPILQAGLPANTTAVVGSDVELLCKVYSDAQPHIQWLKHIVINGSSFGADGFPYVQVLKTADINSSEVEVLYLRNVSAEDAGEYTCLAGNSIGLSYQSAWLTVLPEEDPTWTAAAPEARYTDIILYASGSLALAVLLLLAGLYRGQALHGRHPRPPATVQKLSRFPLARQFSLESGSSGKSSSSLVRGVRLSSSGPALLAGLVSLDLPLDPLWEFPRDRLVLGKPLGEGCFGQVVRAEAFGMDPARPDQASTVAVKMLKDNASDKDLADLVSEMEVMKLIGRHKNIINLLGVCTQEGPLYVIVECAAKGNLREFLRARRPPGPDLSPDGPRSSEGPLSFPVLVSCAYQVARGMQYLESRKCIHRDLAARNVLVTEDNVMKIADFGLARGVHHIDYYKKTSNGRLPVKWMAPEALFDRVYTHQSDVWSFGILLWEIFTLGGSPYPGIPVEELFSLLREGHRMDRPPHCPPELYGLMRECWHAAPSQRPTFKQLVEALDKVLLAVSEEYLDLRLTFGPYSPSGGDASSTCSSSDSVFSHDPLPLGSSSFPFGSGVQT

SEQ ID NO: 582 - protein, 802 aa, Homo sapiens [sequence omitted]

SEQ ID NO: 583 - protein, 993 aa, Homo sapiens
MPALARDGGQLPLLVVFSAMIFGTITNQDLPVIKCVLINHKNNDSSVGKSSSYPMVSESPEDLGCALRPQSSGTVYERAAVEVDVSASITLQVLVDAPGNISCLWVFKHSSLNCQPHFDLQNRGVVSMVILKMTETQAGEYLLFIQSEATNYTILFTVSIRNTLLYTLRRPYFRKMENQDALVCISESVPEPIVEWVLCDSQGESCKEESPAVVKKEEKVLHELFGTDIRCCARNELGRECTRLFTIDLNQTPQTTLPQLFLKVGEPLWIRCKAVHVNHGFGLTWELENKALEEGNYFEMSTYSTNRTMIRILFAFVSSVARNDTGYYTCSSSKHPSQSALVTIVEKGFINATNSSEDYEIDQYEEFCFSVRFKAYPQIRCTWTFSRKSFPCEQKGLDNGYSISKFCNHKHQPGEYIFHAENDDAQFTKMFTLNIRRKPQVLAEASASQASCFSDGYPLPSWTWKKCSDKSPNCTEEITEGVWNRKANRKVFGQWVSSSTLNMSEAIKGFLVKCCAYNSLGTSCETILLNSPGPFPFIQDNISFYATIGVCLLFIVVLTLLICHKYKKQFRYESQLQMVQVTGSSDNEYFYVDFREYEYDLKWEFPRENLEFGKVLGSGAFGKVMNATAYGISKTGVSIQVAVKMLKEKADSSEREALMSELKMMTQLGSHENIVNLLGACTLSGPIYLIFEYCCYGDLLNYLRSKREKFHRTWTEIFKEHNFSFYPTFQSHPNSSMPGSREVQIHPDSDQISGLHGNSFHSEDEIEYENQKRLEEEEDLNVLTFEDLLCFAYQVAKGMEFLEFKSCVHRDLAARNVLVTHGKVVKICDFGLARDIMSDSNYVVRGNARLPVKWMAPESLFEGIYTIKSDVWSYGILLWEIFSLGVNPYPGIPVDANFYKLIQNGFKMDQPFYATEEIYIIMQSCWAFDSRKRPSFPNLTSFLGCQLADAEEAMYQNVDGRVSECPHTYQNRRPFSREMDLGLLSPQAQVEDS

SEQ ID NO: 584 - protein, 505 aa, Homo sapiens [sequence omitted]

SEQ ID NO: 585 - protein, 537 aa, Homo sapiens [sequence omitted]

SEQ ID NO: 586 - protein, 1255 aa, Homo sapiens [sequence omitted]

SEQ ID NO: 587 - protein, 1255 aa, Homo sapiens
MELAALCRWGLLLALLPPGAASTQVCTGTDMKLRLPASPETHLDMLRHLYQGCQVVQGNLELTYLPTNASLSFLQDIQEVQGYVLIAHNQVRQVPLQRLRIVRGTQLFEDNYALAVLDNGDPLNNTTPVTGASPGGLRELQLRSLTEILKGGVLIQRNPQLCYQDTILWKDIFHKNNQLALTLIDTNRSRACHPCSPMCKGSRCWGESSEDCQSLTRTVCAGGCARCKGPLPTDCCHEQCAAGCTGPKHSDCLACLHFNHSGICELHCPALVTYNTDTFESMPNPEGRYTFGASCVTACPYNYLSTDVGSCTLVCPLHNQEVTAEDGTQRCEKCSKPCARVCYGLGMEHLREVRAVTSANIQEFAGCKKIFGSLAFLPESFDGDPASNTAPLQPEQLQVFETLEEITGYLYISAWPDSLPDLSVFQNLQVIRGRILHNGAYSLTLQGLGISWLGLRSLRELGSGLALIHHNTHLCFVHTVPWDQLFRNPHQALLHTANRPEDECVGEGLACHQLCARGHCWGPGPTQCVNCSQFLRGQECVEECRVLQGLPREYVNARHCLPCHPECQPQNGSVTCFGPEADQCVACAHYKDPPFCVARCPSGVKPDLSYMPIWKFPDEEGACQPCPINCTHSCVDLDDKGCPAEQRASPLTSIISAVVGILLVVVLGVVFGILIKRRQQKIRKYTMRRLLQETELVEPLTPSGAMPNQAQMRILKETELRKVKVLGSGAFGTVYKGIWIPDGENVKIPVAIKVLRENTSPKANKEILDEAYVMAGVGSPYVSRLLGICLTSTVQLVTQLMPYGCLLDHVRENRGRLGSQDLLNWCMQIAKGMSYLEDVRLVHRDLAARNVLVKSPNHVKITDFGLARLLDIDETEYHADGGKVPIKWMALESILRRRFTHQSDVWSYGVTVWELMTFGAKPYDGIPAREIPDLLEKGERLPQPPICTIDVYMIMVKCWMIDSECRPRFRELVSEFSRMARDPQRFVVIQNEDLGPASPLDSTFYRSLLEDDDMGDLVDAEEYLVPQQGFFCPDPAPGAGGMVHHRHRSSSTRSGGGDLTLGLEPSEEEAPRSPLAPSEGAGSDVFDGDLGMGAAKGLQSLPTHDPSPLQRYSEDPTVPLPSETDGYVAPLTCSPQPEYVNQPDVRPQPPSPREGPLPAAQPAGATLERPKTLSPGKNGVVKDVFAFGGAVENPEYLTPQGGAAPQPHPPPAFSPAFDNLYYWDQDPPERGAPPSTFKGTPTAENPEYLGLDVPV

SEQ ID NO: 588 - protein, 1255 aa, Homo sapiens [sequence omitted]

SEQ ID NO: 589 - protein, 1342 aa, Homo sapiens [sequence omitted]

SEQ ID NO: 590 - protein, 1132 aa, Homo sapiens [sequence omitted]

SEQ ID NO: 591 - protein, 1124 aa, Homo sapiens
MAPPSEETPLIPQRSCSLLSTEAGALHVLLPARGPGPPQRLSFSFGDHLAEDLCVQAAKASGILPVYHSLFALATEDLSCWFPPSHIFSVEDASTQVLLYRIRFYFPNWFGLEKCHRFGLRKDLASAILDLTVLEHLFAQHRSDLVSGRLPVGLSLKEQGECLSLAVLDLARMAREQAQRPGELLKTVSYKACLPPSLRDLIQGLSFVTRRRIRRTVRRALRRVAACQADRHSLMAKYIMDLERLDPAGAAETFHVGLPGALGGHDGLGLLRVAGDGGIAWTQGEQEVLQPFCDFPEIVDISIKQAPRVGPAGEHRLVTVTRTDNQILEAEFPGLPEALSFVALVDGYFRLTTDSQHFFCKEVAPPRLLEEVAEQCHGPITLDFAINKLKTGGSRPGSYVLRRSPQDFDSFLLTVCVQNPLGPDYKGCLIRRSPTGTFLLVGLSRPHSSLRELLATCWDGGLHVDGVAVTLTSCCIPRPKEKSNLIVVQRGHSPPTSSLVQPQSQYQLSQMTFHKIPADSLEWHENLGHGSFTKIYRGCRHEVVDGEARKTEVLLKVMDAKHKNCMESFLEAASLMSQVSYRHLVLLHGVCMAGDSTMVQEFVHLGAIDMYLRKRGHLVPASWKLQVVKQLAYALNYLEDKGLPHGNVSARKVLLAREGADGSPPFIKLSDPGVSPAVLSLEMLTDRIPWVAPECLREAQTLSLEADKWGFGATVWEVFSGVTMPISALDPAKKLQFYEDRQQLPAPKWTELALLIQQCMAYEPVQRPSFRAVIRDLNSLISSDYELLSDPTPGALAPRDGLWNGAQLYACQDPTIFEERHLKYISQLGKGNFGSVELCRYDPLGDNTGALVAVKQLQHSGPDQQRDFQREIQILKALHSDFIVKYRGVSYGPGRQSLRLVMEYLPSGCLRDFLQRHRARLDASRLLLYSSQICKGMEYLGSRRCVHRDLAARNILVESEAHVKIADFGLAKLLPLDKDYYVVREPGQSPIFWYAPESLSDNIFSRQSDVWSFGVVLYELFTYCDKSCSPSAEFLRMMGCERDVPALCRLLELLEEGQRLPAPPACPAEVHELMKLCWAPSPQDRPSFSALGPQLDMLWSGSRGCETHAFTAHPEGKHHSLSFS

SEQ ID NO: 592 - protein, 1124 aa, Homo sapiens
MAPPSEETPLIPQRSCSLLSTEAGALHVLLPARGPGPPQRLSFSFGDHLAEDLCVQAAKASGILPVYHSLFALATEDLSCWFPPSHIFSVEDASTQVLLYRIRFYFPNWFGLEKCHRFGLRKDLASAILDLPVLEHLFAQHRSDLVSGRLRVGLSLKEQGECLSLAVLDLARMAREQAQRPGELLKTVSYKACLPPSLRDLIQGLSFVTRRRIRRTVRRALRRVAACQADRHSLMAKYIMDLERLDPAGAAETFHVGLPGALGGHDGLGLLRVAGDGGIAWTQGEQEVLQPFCDFPEIVDISIKQAPRVGPAGEHRLVTVTRTDNQILEAEFPGLPEALSFVALVDGYFRLTTDSQHFFCKEVAPPRLLEEVAEQCHGPITLDFAINKLKTGGSRPGSYVLRRSPQDFDSFLLTVCVQNPLGPDYKGCLIRRSPTGTFLLVGLSRPHSSLRELLATCWDGGLHVDGVAVTLTSCCIPRPKEKSNLIVVQRGHSPPTSSLVQPQSQYQLSQMTFHKIPADSLEWHENLGHGSFTKIYRGCRHEVVDGEARKTEVLLKVMDAKHKNCMESFLEAASLMSQVSYRHLVLLHGVCMAGDSTMVQEFVHLGAIDMYLRKRGHLVPASWKLQVVKQLAYALNYLEDKGLPHGNVSARKVLLAREGADGSPPFIKLSDPGVSPAVLSLEMLTDRIPWVAPECLREAQTLSLEADKWGFGATVWEVFSGVTMPISALDPAKKLQFYEDRQQLPAPKWTELALLIQQCMAYEPVQRPSFRAVIRDLNSLISSDYELLSDPTPGALAPRDGLWNGAQLYACQDPTIFEERHLKYISQLGKGNFGSVELCRYDPLGDNTGALVAVKQLQHSGPDQQRDFQREIQILKALHSDFIVKYRGVSYGPGRQSLRLVMEYLPSGCLRDFLQRHRARLDASRLLLYSSQICKGMEYLGSRRCVHRDLAARNILVESEAHVKIADFGLAKLLPLDKDYYVVREPGQSPIFWYAPESLSDNIFSRQSDVWSFGVVLYELFTYCDKSCSPSAEFLRMMGCERDVPALCRLLELLEEGQRLPAPPACPAEVHELMKLCWAPSPQDRPSFSALGPQLDMLWSGSRGCETHAFTAHPEGKHHSLSFS

SEQ ID NO: 593 - protein, 1124 aa, Homo sapiens
MAPPSEETPLIPQRSCSLLSTEAGALHVLLPARGPGPPQRLSFSFGDHLAEDLCVQAAKASGILPVYHSLFALATEDLSCWFPPSHIFSVEDASTQVLLYRIRFYFPNWFGLEKCHRFGLRKDLASAILDLPVLEHLFAQHRSDLVSGRLPVGLSLKEQGECLSLAVLDLARMAREQAQRPGELLKTVSYKACLPPSLRDLIQGLSFVTRRRIRRTVRRALRRVAACQADRHSLMAKYIMDLERLDPAGAAETFHVGLPGALGGHDGLGLLRVAGDGGIAWTQGEQEVLQPFCDFPEIVDISIKQAPRVGPAGEHRLVTVTRTDNQILEAEFPGLPEALSFVALVDGYFRLTTDSQHFFCKEVAPPRLLEEVAEQCHGPITLDFAINKLKTGGSRPGSYVLRRSPQDFDSFLLTVCVQNPLGPDYKGCLIRRSPTGTFLLVGLSRPHSSLRELLATCWDGGLHVDGVAVTLTSCCIPRPKEKSNLIVVQRGHSPPTSSLVQPQSQYQLSQMTFHKIPADSLEWHENLGHGSFTKIYRGCRHEVVDGEARKTEVLLKVMDAKHKNCMESFLEAASLMSQVSYRHLVLLHGVCMAGDSTMVQEFVHLGAIDMYLRKRGHLVPASWKLQVVKQLAYALNYLEDKGLPHGNVSARKVLLAREGADGSPPFIKLSDPGVSPAVLSLEMLTDRIPWVAPECLREAQTLSLEADKWGFGATVWEVFSGITMPISALDPAKKLQFYEDRQQLPAPKWTELALLIQQCMAYEPVQRPSFRAVIRDLNSLISSDYELLSDPTPGALAPRDGLWNGAQLYACQDPTIFEERHLKYISQLGKGNFGSVELCRYDPLGDNTGALVAVKQLQHSGPDQQRDFQREIQILKALHSDFIVKYRGVSYGPGRQSLRLVMEYLPSGCLRDFLQRHRARLDASRLLLYSSQICKGMEYLGSRRCVHRDLAARNILVESEAHVKIADFGLAKLLPLDKDYYVVREPGQSPIFWYAPESLSDNIFSRQSDVWSFGVVLYELFTYCDKSCSPSAEFLRMMGCERDVPALCRLLELLEEGQRLPAPPACPAEVHELMKLCWAPSPQDRPSFSALGPQLDMLWSGSRGCETHAFTAHPEGKHHSLSFS

SEQ ID NO: 594 - protein, 1503 aa, Homo sapiens
MPGPPALRRRLLLLLLVLLIAGSAGAAPLAQTGAGEAPPAAEVSSSFVILCVCSLIILIVLIANCVSCCKDPEIDFKEFEDNFDDEIDFTPPAEDTPSVQSPAEVFTLSVPNISLPAPSQFQPSVEGLKSQVARHSLNYIQEIGNGWFGKVLLGEIYTGTSVARVIVKELKASANPKEQDTFLKNGEPYYILQHPNILQCVGQCVEAIPYLLVFEFCDLGDLKAYLRSEQEHMRGDSQTMLLQRMACEVAAGLAAMHKLHFLHSDLALRNCFLTSDLNVKVGDYGIGFSRYKEDYIETDDKKVFPLRWTAPELVTSFQDRLLTADQTKYSNIWSLGVTLWELFDNAAQPYSNLSNLDVLNQVIRERDTKLPKPQLEQPYSDRWYEVLQFCWLSPEKRPAAEDVHRLLTYLRLQSQRDSEVDFEQQWNALKPNTNSRDSSNNAAFPILDHFARDRLGREMEEVLTVTETSQGLSFEYVWEAAKHDHFDERSRGHLDEGLSYTSIFYPVEVFESSLSDPGPGKQDDSGQDVPLRVPGVVPVFDAHNLSVGSDYYIQLEEKSGSNLELDYPPALLTTDMDNPERTGPELSQLTALRSVELEESSTDEDFFQSSTDPKDSSLPGDLHVTSGPESPFNNIFNDVDKSEDLPSHQKIFDLMELNGVQADFKPATLSSSLDNPKESVITGHFEKEKPRKIFDSEPLCLSDNLMHQDNFDPLNVQELSENFLFLQEKNLLKGSLSSKEHINDLQTELKNAGFTEAMLETSCRNSLDTELQFAENKPGLSLLQENVSTKGDDTDVMLTGDTLSTSLQSSPEVQVPPTSFETEETPRRVPPDSLPTQGETQPTCLDVIVPEDCLHQDISPDAVTVPVEILSTDARTHSLDNRSQDSPGESEETLRLTESDSVLADDILASRVSVGSSLPELGQELHNKPFSEDHHSHRRLEKNLEAVETLNQLNSKDAAKEAGLVSALSSDSTSQDSLLEDSLSAPFPASEPSLETPDSLESVDVHEALLDSLGSHTPQKLVPPDKPADSGYETENLESPEWTLHPAPEGTADSEPATTGDGGHSGLPPNPVIVISDAGDGHRGTEVTPETFTAGSQGSYRDSAYFSDNDSEPEKRSEEVPGTSPSALVLVQEQPLPEPVLPEQSPAAQDSCLEARKSQPDESCLSALHNSSDLELRATPEPAQTGVPQQVHPTEDEASSPWSVLNAELSSGDDFETQDDRPCTLASTGTNTNELLAYTNSALDKSLSSHSEGPKLKEPDIEGKYLGKLGVSGMLDLSEDGMDADEEDENSDDSDEDLRAFNLHSLSSESEDETEHPVPIILSNEDGRHLRSLLKPTAANAPDPLPEDWKKEKKAVTFFDDVTVYLFDQETPTKELGPCGGEACGPDLSGPAPASGSPYLSRCINSESSTDEEGGGFEWDDDFSPDPFMSKTTSNLLSSKPSLQTSKYFSPPPPARSTEQSWPHSAPYSRFSISPANIASFSLTHLTDSDIEQGGSSEDGEKD

SEQ ID NO: 595 - protein, 1503 aa, Homo sapiens
MPGPPALRRRLLLLLLVLLIAGSAGAAPLPQTGAGEAPPAAEVSSSFVILCVCSLIILIVLIANCVSCCKDPEIDFKEFEDNFDDEIDFTPPAEDTPSVQSPAEVFTLSVPNISLPAPSQFQPSVEGLKSQVARHSLNYIQEIGNGWFGKVLLGEIYTGTSVARVIVKELKASANPKEQDTFLKNGEPYYILQHPNILQCVGQCVEAIPYLLVFEFCDLGDLKAYLRSEQEHMRGDSQTMLLQRMACEVAAGLAAMHKLHFLHSDLALRNCFLTSDLNVKVGDYGIGFSRYKEDYIETDDKKVFPLRWTAPELVTSFQDRLLTADQTKYSNIWSLGVTLWELFDNAAQPYSNLSNLDVLNQVIRERDTKLPKPQLEQPYSDRWYEVLQFCWLSPEKRPAAEDVHRLLTYLRLQSQRDSEVDFEQQWNALKPNTNSRDSSNNAAFPILDHFARDRLGREMEEVLTVTETSQGLSFEYVWEAAKHDHFDERSRGHLDEGLSYTSIFYPVEVFESSLSDPGPGKQDDSGQDVPLRVPGVVPVFDAHNLSVGSDYYIQLEEKSGSNLELDYPPALLTTDMDNPERTGPELSQLTALRSVELEESSTDEDFFQSSTDPKDSSLPGDLHVTSGPESPFNNIFNDVDKSEDLPSHQKIFDLMELNGVQADFKPATLSSSLDNPKESVITGHFEKEKPRKIFDSEPLCLSDNLMHQDNFDPLNVQELSENFLFLQEKNLLKGSLSSKEHINDLQTELKNAGFTEAMLETSCRNSLDTELQFAENKPGMSLLQENVSTKGDDTDVMLTGDTLSTSLQSSPEVQVPPTSFETEETPRRVPPDSLPTQGETQPTCLDVIVPEDCLHQDISPDAVTVPVEILSTDARTHSLDNRSQDSPGESEETLRLTESDSVLADDILASRVSVGSSLPELGQELHNKPFSEDHHSHRRLEKNLEAVETLNQLNSKDAAKEAGLVSALSSDSTSQDSLLEDSLSAPFPASEPSLETPDSLESVDVHEALLDSLGSHTPQKLVPPDKPADSGYETENLESPEWTLHPAPEGTADSEPATTGDGGHSGLPPNPVIVISDAGDGHRGTEVTPETFTAGSQGSYRDSAYFSDNDSEPEKRSEEVPGTSPSALVLVQEQPLPEPVLPEQSPAAQDSCLEARKSQPDESCLSALHNSSDLELRATPEPAQTGVPQQVHPTEDEASSPWSVLNAELSSGDDFETQDDRPCTLASTGTNTNELLAYTNSALDKSLSSHSEGPKLKEPDIEGKYLGKLGVSGMLDLSEDGMDADEEDENSDDSDEDLRAFNLHSLSSESEDETEHPVPIILSNEDGRHLRSLLKPTAANAPDPLPEDWKKEKKAVTFFDDVTVYLFDQETPTKELGPCGGEACGPDLSGPAPASGSPYLSRCINSESSTDEEGGGFEWDDDFSPDPFMSKTTSNLLSSKPSLQTSKYFSPPPPARSTEQSWPHSAPYSRFSISPANIASFSLTHLTDSDIEQGGSSEDGEKD

SEQ ID NO: 596 - protein, 1503 aa, Homo sapiens [sequence omitted]

SEQ ID NO: 597 - protein, 507 aa, Homo sapiens
MAGRGSLVSWRAFHGCDSAEELPRVSPRFLRAWHPPPVSARMPTRRWAPGTQCITKCEHTRPKPGELAFRKGDVVTILEACENKSWYRVKHHTSGQEGLLAAGALREREALSADPKLSLMPWFHGKISGQEAVQQLQPPEDGLFLVRESARHPGDYVLCVSFGRDVIHYRVLHRDGHLTIDEAVFFCNLMDMVEHYSKDKGAICTKLVRPKRKHGTKSAEEELARAGWLLNLQHLTLGAQIGEGEFGAVLQGEYLGQKVAVKNIKCDVTAQAFLDETAVMTKMQHENLVRLLGVILHQGLYIVMEHVSKGNLVNFLRTRGRALVNTAQLLQFSLHVAEGMEYLESKKLVHRDLAARNILVSEDLVAKVSDFGLAKAERKGLDSSRLPVKWTAPEALKHGKFTSKSDVWSFGVLLWEVFSYGRAPYPKMSLKEVSEAVEKGYRMEPPEGCPGPVHVLMSSCWEAEPARRPPFRKLAEKLARELRSAGAPASVSGQDTDGSTSPRSQEP

SEQ ID NO: 598 - protein, 999 aa, Homo sapiens
MGPAPLPLLLGLFLPALWRRAITEAREEAKPYPLFPGPFPGSLQTDHTPLLSLPHASGYQPALMFSPTQPGRPHTGNVAIPQVTSVESKPLPPLAFKHTVGHIILSEHKGVKFNCSISVPNIYQDTTISWWKDGKELLGAHHAITQFYPDDEVTAIIASFSITSVQRSDNGSYICKMKINNEEIVSDPIYIEVQGLPHFTKQPESMNVTRNTAFNLTCQAVGPPEPVNIFWVQNSSRVNEQPEKSPSVLTVPGLTEMAVFSCEAHNDKGLTVSKGVQINIKAIPSPPTEVSIRNSTAHSILISWVPGFDGYSPFRNCSIQVKEADPLSNGSVMIFNTSALPHLYQIKQLQALANYSIGVSCMNEIGWSAVSPWILASTTEGAPSVAPLNVTVFLNESSDNVDIRWMKPPTKQQDGELVGYRISHVWQSAGISKELLEEVGQNGSRARISVQVHNATCTVRIAAVTRGGVGPFSDPVKIFIPAHGWVDYAPSSTPAPGNADPVLIIFGCFCGFILIGLILYISLAIRKRVQETKFGNAFTEEDSELVVNYIAKKSFCRRAIELTLHSLGVSEELQNKLEDVVIDRNLLILGKILGEGEFGSVMEGNLKQEDGTSLKVAVKTMKLDNSSQREIEEFLSEAACMKDFSHPNVIRLLGVCIEMSSQGIPKPMVILPFMKYGDLHTYLLYSRLETGPKHIPLQTLLKFMVDIALGMEYLSNRNFLHRDLAARNCMLRDDMTVCVADFGLSKKIYSGDYYRQGRIAKMPVKWIAIESLADRVYTSKSDVWAFGVTMWEIATRGMTPYPGVQNHEMYDYLLHGHRLKQPQDCLDELYEIMYSCWRTDPLDRPTFSVLRLQLEKLLESLPDVRNQADVIYVNTQLLESSEGLAQGSTLAPLDLNIDPDSIIASCTPRAAISVVTAEVHDSKPHEGRYILNGGSEEWEDLTSAPSAAVTAEKNSVLPGERLVRNGVSWSHSSMLPLGSSLPDELLFADDSSEGSEVLM

SEQ ID NO: 599 - protein, 999 aa, Homo sapiens
MGPAPLPLLLGLFLPALWRRAITEAREEAKPYPLFPGPFPGSLQTDHTPLLSLPHASGYQPALMFSPTQPGRPHTGNVAIPQVTSVESKPLPPLAFKHTVGHIILSEHKGVKFNCSISVPNIYQDTTISWWKDGKELLGAHHAITQFYPDDEVTAIIASFSITSVQRSDNGSYICKMKINNEEIVSDPIYIEVQGLPHFTKQPESMNVTRNTAFNLTCQAVGPPEPVNIFWVQNSSRVNEQPEKSPSVLTVPGLTEMAVFSCEAHNDKGLTVSKGVQINIKAIPSPPTEVSIRNSTAHSILISWVPGFDGYSPFRNCSIQVKEADPLSNGSVMIFNTSALPHLYQIKQLQALANYSIGVSCMNEIGWSAVSPWILASTTEGAPSVAPLNVTVFLNESSDNVDIRWMKPPTKQQDGELVGYRISHVWQSAGISKELLEEVGQNGSRARISVQVHNATCTVRIAAVTRGGVGPFSDPVKIFIPAHGWVDYAPSSTPAPGNADPVLIIFGCFCGFILIGLILYISLAIRKRVQETKFGNAFTEEDSELVVNYIAKKSFCRRAIELTLHSLGVSEELQNKLEDVVIDRNLLILGKILGEGEFGSVMEGNLKQEDGTSLKVAVKTMKLDNSSQREIEEFLSEAACMKDFSHPNVIRLLGVCIEMSSQGIPKPMVILPFMKYGDLHTYLLYSRLETGPKHIPLQTLLKFMVDIALGMEYLSNRNFLHRDLAARNCMLRDDMTVCVADFGLSKKIYSGDYYRQGRIAKMPVKWIAIESLADRVYTSKSDVWAFGVTMWEIATRGMTPYPGVQNHEMYDYLLHGHRLKQPEDCLDELYEIMYSCWRTDPLDRPTFSVLRLQLEKLLESLPDVRNQADIIYVNTQLLESSEGLAQGSTLAPLDLNIDPDSIIASCTPRAAISVVTAEVHDSKPHEGRYILNGGSEEWEDLTSAPSAAVTAEKNSVLPGERLVRNGVSWSHSSMLPLGSSLPDELLFADDSSEGSEVLM

SEQ ID NO: 600 - protein, 1408 aa, Homo sapiens
MKAPAVLAPGILVLLFTLVQRSNGECKEALAKSEMNVNMKYQLPNFTAETPIQNVILHEHHIFLGATNYIYVLNEEDLQKVAEYKTGPVLEHPDCFPCQDCSSKANLSGGVWKDNINMALVVDTYYDDQLISCGSVNRGTCQRHVFPHNHTADIQSEVHCIFSPQIEEPSQCPDCVVSALGAKVLSSVKDRFINFFVGNTINSSYFPDHPLHSISVRRLKETKDGFMFLTDQSYIDVLPEFRDSYPIKYVHAFESNNFIYFLTVQRETLDAQTFHTRIIRFCSINSGLHSYMEMPLECILTEKRKKRSTKKEVFNILQAAYVSKPGAQLARQIGASLNDDILFGVFAQSKPDSAEPMDRSAMCAFPIKYVNDFFSKIVNKNNVRCLQHFYGPNHEHCFNRTLLRNSSGCEARRDEYRTEFTTALQRVDLFMGQFSEVLLTSISTFIKGDLTIANLGTSEGRFMQVVVSRSGPSTPHVNFLLDSHPVSPEVIVEHTLNQNGYTLVITGKKITKIPLNGLGCRHFQSCSQCLSAPPFVQCGWCHDKCVRSEECLSGTWTQQICLPAIYKVFPNSAPLEGGTRLTICGWDFGFRRNNKFDLKKTRVLLGNESCTLTLSESTMNTLKCTVGPAMNKHFNMSIIISNGHGTTQYSTFSYVDPVITSISPKYGPMAGGTLLTLTGNYLNSGNSRHISIGGKTCTLKSVSNSILECYTPAQTISTEFAVKLKIDLANRETSIFSYREDPIVYEIHPTKSFISTWWKEPLNIVSFLFCFASGGSTITGVGKNLNSVSVPRMVINVHEAGRNFTVACQHRSNSEIICCTTPSLQQLNLQLPLKTKAFFMLDGILSKYFDLIYVHNPVFKPFEKPVMISMGNENVLEIKGNDIDPEAVKGEVLKVGNKSCENIHLHSEAVLCTVPNDLLKLNSELNIEWKQAISSTVLGKVIVQPDQNFTGLIAGVVSISTALLLLLGFFLWLKKRKQIKDLGSELVRYDARVHTPHLDRLVSARSVSPTTEMVSNESVDYRATFPEDQFPNSSQNGSCRQVQYPLTDMSPILTSGDSDISSPLLQNTVHIDLSALNPELVQAVQHVVIGPSSLIVHFNEVIGRGHFGCVYHGTLLDNDGKKIHCAVKSLNRITDIGEVSQFLTEGIIMKDFSHPNVLSLLGICLRSEGSPLVVLPYMKHGDLRNFIRNETHNPTVKDLIGFGLQVAKAMKYLASKKFVHRDLAARNCMLDEKFTVKVADFGLARDMYDKEYYSVHNKTGAKLPVKWMALESLQTQKFTTKSDVWSFGVVLWELMTRGAPPYPDVNTFDITVYLLQGRRLLQPEYCPDPLYEVMLKCWHPKAEMRPSFSELVSRISAIFSTFIGEHYVHVNATYVNVKCVAPYPSLLSSEDNADDEVDTRPASFWETS

SEQ ID NO: 601 - protein, 1408 aa, Homo sapiens
MKAPAVLAPGILVLLFTLVQRSNGECKEALAKSEMNVNMKYQLPNFTAETPIQNVILHEHHIFLGATNYIYVLNEEDLQKVAEYKTGPVLEHPDCFPCQDCSSKANLSGGVWKDNINMALVVDTYYDDQLISCGSVNRGTCQRHVFPHNHTADIQSEVHCIFSPQIEEPSQCPDCVVSALGAKVLSSVKDRFINFFVGNTINSSYFPDHPLHSISVRRLKETKDGFMFLTDQSYIDVLPEFRDSYPIKYVHAFESNNFIYFLTVQRETLDAQTFHTRIIRFCSINSGLHSYMEMPLECILTEKRKKRSTKKEVFNILQAAYVSKPGAQLARQIGASLNDDILFGVFAQSKPDSAEPMDRSAMCAFPIKYVNDFFNKIVNKNNVRCLQHFYGPNHEHCFNRTLLRNSSGCEARRDEYRTEFTTALQRVDLFMGQFSEVLLTSISTFIKGDLTIANLGTSEGRFMQVVVSRSGPSTPHVNFLLDSHPVSPEVIVEHTLNQNGYTLVITGKKITKIPLNGLGCRHFQSCSQCLSAPPFVQCGWCHDKCVRSEECLSGTWTQQICLPAIYKVFPNSAPLEGGTRLTICGWDFGFRRNNKFDLKKTRVLLGNESCTLTLSESTMNTLKCTVGPAMNKHFNMSIIISNGHGTTQYSTFSYVDPVITSISPKYGPMAGGTLLTLTGNYLNSGNSRHISIGGKTCTLKSVSNSILECYTPAQTISTEFAVKLKIDLANRETSIFSYREDPIVYEIHPTKSFISTWWKEPLNIVSFLFCFASGGSTITGVGKNLNSVSVPRMVINVHEAGRNFTVACQHRSNSEIICCTTPSLQQLNLQLPLKTKAFFMLDGILSKYFDLIYVHNPVFKPFEKPVMISMGNENVLEIKGNDIDPEAVKGEVLKVGNKSCENIHLHSEAVLCTVPNDLLKLNSELNIEWKQAISSTVLGKVIVQPDQNFTGLIAGVVSISTALLLLLGFFLWLKKRKQIKDLGSELVCYDARVHTPHLDRLVSARSVSPTTEMVSNESVDYRATFPEDQFPNSSQNGSCRQVQYPLTDMSPILTSGDSDISSPLLQNTVHIDLSALNPELVQAVQHVVIGPSSLIVHFNEVIGRGHFGCVYHGTLLDNDGKKIHCAVKSLNRITDIGEVSQFLTEGIIMKDFSHPNVLSLLGICLRSEGSPLVVLPYMKHGDLRNFIRNETHNPTVKDLIGFGLQVAKAMKYLASKKFVHRDLAARNCMLDEKFTVKVADFGLARDMYDKEYYSVHNKTGAKLPVKWMALESLQTQKFTTKSDVWSFGVVLWELMTRGAPPYPDVNTFDITVYLLQGRRLLQPEYCPDPLYEVMLKCWHPKAEMRPSFSELVSRISAIFSTFIGEHYVHVNATYVNVKCVAPYPSLLSSEDNADDEVDTRPASFWETS

SEQ ID NO: 602 - protein, 1408 aa, Homo sapiens
MKAPAVLAPGILVLLFTLVQRSNGECKEALAKSEMNVNMKYQLPNFTAETPIQNVILHEHHIFLGATNYIYVLNEEDLQKVAEYKTGPVLEHPDCFPCQDCSSKANLSGGVWKDNINMALVVDTYYDDQLISCGSVNRGTCQRHVFPHNHTADIQSEVHCIFSPQIEEPSQCPDCVVSALGAKVLSSVKDRFINFFVGNTINSSYFPDHPLHSISVRRLKETKDGFMFLTDQSYIDVLPEFRDSYPIKYVHAFESNNFIYFLTVQRETLDAQTFHTRIIRFCSINSGLHSYMEMPLECILTEKRKKRSTKKEVFNILQAAYVSKPGAQLARQIGASLNDDILFGVFAQSKPDSAEPMDRSAMCAFPIKYVNDFFNKIVNKNNVRCLQHFYGPNHEHCFNRTLLRNSSGCEARRDEYRTEFTTALQRVDLFMGQFSEVLLTSISTFIKGDLTIANLGTSEGRFMQVVVSRSGPSTPHVNFLLDSHPVSPEVIVEHTLNQNGYTLVITGKKITKIPLNGLGCRHFQSCSQCLSAPPFVQCGWCHDKCVRSEECLSGTWTQQICLPAIYKVFPNSAPLEGGTRLTICGWDFGFRRNNKFDLKKTRVLLGNESCTLTLSESTMNTLKCTVGPAMNKHFNMSIIISNGHGTTQYSTFSYVDPVITSISPKYGPMAGGTLLTLTGNYLNSGNSRHISIGGKTCTLKSVSNSILECYTPAQTISTEFAVKLKIDLANRETSIFSYREDPIVYEIHPTKSFISTWWKEPLNIVSFLFCFASGGSTITGVGKNLNSVSVPRMVINVHEAGRNFTVACQHRSNSEIICCTTPSLQQLNLQLPLKTKAFFMLDGILSKYFDLIYVHNPVFKPFEKPVMISMGNENVLEIKGNDIDPEAVKGEVLKVGNKSCENIHLHSEAVLCTVPNDLLKLNSELNIEWKQAISSTVLGKVIVQPDQNFTGLIAGVVSISTALLLLLGFFLWLKKRKQIKDLGSELVRYDARVHTPHLDRLVSARSVSPITEMVSNESVDYRATFPEDQFPNSSQNGSCRQVQYPLTDMSPILTSGDSDISSPLLQNTVHIDLSALNPELVQAVQHVVIGPSSLIVHFNEVIGRGHFGCVYHGTLLDNDGKKIHCAVKSLNRITDIGEVSQFLTEGIIMKDFSHPNVLSLLGICLRSEGSPLVVLPYMKHGDLRNFIRNETHNPTVKDLIGFGLQVAKAMKYLASKKFVHRDLAARNCMLDEKFTVKVADFGLARDMYDKEYYSVHNKTGAKLPVKWMALESLQTQKFTTKSDVWSFGVVLWELMTRGAPPYPDVNTFDITVYLLQGRRLLQPEYCPDPLYEVMLKCWHPKAEMRPSFSELVSRISAIFSTFIGEHYVHVNATYVNVKCVAPYPSLLSSEDNADDEVDTRPASFWETS

SEQ ID NO: 603 - protein, 1408 aa, Homo sapiens
MKAPAVLAPGILVLLFTLVQRSNGECKEALAKSEMNVNMKYQLPNFTAETPIQNVILHEHHIFLGATNYIYVLNEEDLQKVAEYKTGPVLEHPDCFPCQDCSSKANLSGGVWKDNINMALVVDTYYDDQLISCGSVNRGTCQRHVFPHNHTADIQSEVHCIFSPQIEEPSQCPDCVVSALGAKVLSSVKDRFINFFVGNTINSSYFPDHPLHSISVRRLKETKDGFMFLTDQSYIDVLPEFRDSYPIKYVHAFESNNFIYFLTVQRETLDAQTFHTRIIRFCSINSGLHSYMEMPLECILTEKRKKRSTKKEVFNILQAAYVSKPGAQLARQIGASLNDDILFGVFAQSKPDSAEPMDRSAMCAFPIKYVNDFFNKIVNKNNVRCLQHFYGPNHEHCFNRTLLRNSSGCEARRDEYRTEFTTALQRVDLFMGQFSEVLLTSISTFIKGDLTIANLGTSEGRFMQVVVSRSGPSTPHVNFLLDSHPVSPEVIVEHTLNQNGYTLVITGKKITKIPLNGLGCRHFQSCSQCLSAPPFVQCGWCHDKCVRSEECLSGTWTQQICLPAIYKVFPNSAPLEGGTRLTICGWDFGFRRNNKFDLKKTRVLLGNESCTLTLSESTMNTLKCTVGPAMNKHFNMSIIISNGHGTTQYSTFSYVDPVITSISPKYGPMAGGTLLTLTGNYLNSGNSRHISIGGKTCTLKSVSNSILECYTPAQTISTEFAVKLKIDLANRETSIFSYREDPIVYEIHPTKSFISTWWKEPLNIVSFLFCFASGGSTITGVGKNLNSVSVPRMVINVHEAGRNFTVACQHRSNSEIICCTTPSLQQLNLQLPLKTKAFFMLDGILSKYFDLIYVHNPVFKPFEKPVMISMGNENVLEIKGNDIDPEAVKGEVLKVGNKSCENIHLHSEAVLCTVPNDLLKLNSELNIEWKQAISSTVLGKVIVQPDQNFTGLIAGVVSISTALLLLLGFFLWLKKRKQIKDLGSELVRYDARVHTPHLDRLVSARSVSPTTEMVSNESVDYRATFPEDQFPNSSQNGSCRQVQYPLTDMSPILTSGDSDISSPLLQNTVHIDLSALNPELVQAVQHVVIGPSSLIVHFNEVIGRGHFGCVYHGTLLDNDGKKIHCAVKSLNRITDIGEVSQFLTEGIIMKDFSHPNVLSLLGICLRSEGSPLVVLPYMKHGDLRNFIRNETHNPTVKDLIGFGLQVAKAMKYLASKKFVHRDLAARNCMLDEKFTVKIADFGLARDMYDKEYYSVHNKTGAKLPVKWMALESLQTQKFTTKSDVWSFGVVLWELMTRGAPPYPDVNTFDITVYLLQGRRLLQPEYCPDPLYEVMLKCWHPKAEMRPSFSELVSRISAIFSTFIGEHYVHVNATYVNVKCVAPYPSLLSSEDNADDEVDTRPASFWETS

SEQ ID NO: 604 - protein, 796 aa, Homo sapiens
MLRGGRRGQLGWHSWAAGPGSLLAWLILASAGAAPCPDACCPHGSSGLRCTRDGALDSLHHLPGAENLTELYIENQQHLQHLELRDLRGLGELRNLTIVKSGLRFVAPDAFHFTPRLSRLNLSFNALESLSWKTVQGLSLQELVLSGNPLHCSCALRWLQRWEEEGLGGVPEQKLQCHGQGPLAHMPNASCGVPTLKVQVPNASVDVGDDVLLRCQVEGRGLEQAGWILTELEQSATVMKSGGLPSLGLTLANVTSDLNRKNVTCWAENDVGRAEVSVQVNVSFPASVQLHTAVEMHHWCIPFSVDGQPAPSLRWLFNGSVLNETSFIFTEFLEPAANETVRHGCLRLNQPTHVNNGNYTLLAANPFGQASASIMAAFMDNPFEFNPEDPIPVSFSPVDTNSTSGDPVEKKDETPFGVSVAVGLAVFACLFLSTLLLVLNKCGRRNKFGINRPAVLAPEDGLAMSLHFMTLGGSSLSPTEGKGSGLQGHIIENPQYFSDACVHHIKRRDIVLKWELGEGAFGKVFLAECHNLLPEQDKMLVAVKALKEASESARQDFQREAELLTMLQHQHIVRFFGVCTEGRPLLMVFEYMRHGDLNRFLRSYGPDAKLLAGGEDVAPGPLGLGQLLAVASQVAAGMVYLAGLHFVHRDLATRNCLVGQGLVVKIGDFGMSRDIYSTDYYRVGGRTMLPIRWMPPESILYRKFTTESDVWSFGVVLWEIFTYGKQPWYQLSNTEAIDCITQGRELERPRACPPEVYAIMRGCWQREPQQRHSIKDVHARLQALAQAPPVYLDVLG

SEQ ID NO: 605 - protein, 796 aa, Homo sapiens
MLRGGRRGQLGWHSWAAGPGSLLAWLILASAGAAPCPDACCPHGSSGLRCTRDGALDSLHHLPGAENLTELYIENQQHLQHLELRDLRGLGELRNLTIVKSGLRFVAPDAFHFTPRLSRLNLSFNALESLSWKTVQGLSLQELVLSGNPLHCSCALRWLQRWEEEGLGGVPEQKLQCHGQGPLAHMPNASCGVPTLKVQVPNASVDVGDDVLLRCQVEGRGLEQAGWILTELEQSATVMKSGGLPSLGLTLANVTSDLNRKNVTCWAENDVGRAEVSVQVNVSFPASVQLHTAVEMHHWCIPFSVDGQPAPSLRWLFNGSVLNETSFIFTEFLEPAANETVRHGCLRLNQPTHVNNGNYTLLAANPFGQASASIMAAFMDNPFEFNPEDPIPVSFSPVDTNSTSGDPVEKKDETPFGVSVAVGLAVFACLFLSTLLLVLNKCGRRNKFGINRPAVLAPEDGLAMSLHFMTLGGSSLSPTEGKGSGLQGHIIENPQYFSDACVHHIKRRDIVLKWELGEGAFGKVFLAECHNLLPEQDKMLVAVKALKEASESARQDFQREAELLTMLQHQHIVRFFGVCTEGRPLLMVFEYMRHGDLNRFLRSHGPDAKLLAVGEDVAPGPLGLGQLLAVASQVAAGMVYLAGLHFVHRDLATRNCLVGQGLVVKIGDFGMSRDIYSTDYYRVGGRTMLPIRWMPPESILYRKFTTESDVWSFGVVLWEIFTYGKQPWYQLSNTEAIDCITQGRELERPRACPPEVYAIMRGCWQREPQQRHSIKDVHARLQALAQAPPVYLDVLG

SEQ ID NO: 606 - protein, 796 aa, Homo sapiens
MLRGGRRGQLGWHSWAAGPGSLLAWLILASAGAAPCPDACCPHGSSGLRCTRDGALDSLHHLPGAENLTELYIENQQHLQHLELRDLRGLGELRNLTIVKSGLRFVAPDAFHFTPRLSRLNLSFNALESLSWKTVQGLSLQELVLSGNPLHCSCALRWLQRWEEEGLGGVPEQKLQCHGQGPLAHMPNASCGVPTLKVQVPNASVDVGDDVLLRCQVEGRGLEQAGWILTELEQSATVMKSGGLPSLGLTLANVTSDLNRKNVTCWAENDVGRAEVSVQVNVSFPASVQLHTAVEMHHWCIPFSVDGQPAPSLRWLFNGSVLNETSFIFTEFLEPAANETVRHGCLRLNQPTHVNNGNYTLLAANPFGQASASIMAAFMDNPFEFNPEDPIPVSFSPVDTNSTSGDPVEKKDETPFGVSVAVGLAVFACLFLSTLLLVLNKCGRRNKFGINRPAVLAPEDGLAMSLHFMTLGGSSLSPTEGKGSGLQGHIIENPQYFSDACVHHIKRRDIVLKWELGEGAFGKVFLAECHNLLPEQDKMLVAVKALKEASESARQDFQREAELLTMLQHQHIVRFFGVCTEGRPLLMVFEYMRHGDLNRFLRSHGPDAKLLAGGEDVAPGPLGLGQLLAVASQVAAGMVYLAGLHFVHRDLATRNCLVGQGLVVKIGDFGMSRDIYSTDYYRVGGRTMLPIRWMPPESILYRKFTTESDVWSFGVVLWEIFTYGKQPWYQLSNTEAIDCITQGRELERPRACPPEVYAIMRGCWQREPQQRHSIKDVHAQLQALAQAPPVYLDVLG

SEQ ID NO: 607 - protein, 817 aa, Homo sapiens
MDVSLCPAKCSFWRIFLLGSVWLDYVGSVLACPANCVCSKTEINCRRPDDGNLFPLLEGQDSGNSNGNASINITDISRNITSIHIENWRSLHTLNAVDMELYTGLQKLTIKNSGLRSIQPRAFAKNPHLRYINLSSNRLTTLSWQLFQTLSLRELQLEQNFFNCSCDIRWMQLWQEQGEAKLNSQNLYCINADGSQLPLFRMNISQCDLPEISVSHVNLTVREGDNAVITCNGSGSPLPDVDWIVTGLQSINTHQTNLNWTNVHAINLTLVNVTSEDNGFTLTCIAENVVGMSNASVALTVYYPPRVVSLEEPELRLEHCIEFVVRGNPPPTLHWLHNGQPLRESKIIHVEYYQEGEISEGCLLFNKPTHYNNGNYTLIAKNPLGTANQTINGHFLKEPFPESTDNFILFDEVSPTPPITVTHKPEEDTFGVSIAVGLAAFACVLLVVLFVMIFGMKGPVAVISGEEDSASPLHHINHGITTPSSLDAGPDTVVIGMTRIPVIENPQYFRQGHNCHKPDTYVQHIKRRDIVLKRELGEGAFGKVFLAECYNLSPTKDKMLVAVKALKDPTLAARKDFQREAELLTNLQHEHIVKFYGVCGDGDPLIMVFEYMKHGDLNKFLRAHGPNAMILVDGQPRQAKGELGLSQMLHIASQIASGMVYLASQHFVHRDLATRNCLVGANLLVKIGDFGMSRDVYSTDYYRVGGHTMLPIRWMPPESIMYRKFTTESDVWSFGVILWEIFTYGKQPWFQLSNTEVIECITQGRVLERPRVCPKEVYDVMLGCWQREPQQRLNIKEIYKILHALGKATPIYLDILG

SEQ ID NO: 608 - protein, 762 aa, Homo sapiens
MDVSLCPAKCSFWRIFLLGSVWLDYVGSVLACPANCVCSKTEINCRRPDDGNLFPLLEGQDSGNSNGNASINITDISRNITSIHIENWRSLHTLNAVDMELYTGLQKLTIKNSGLRSIQPRAFAKNPHLRYINLSSNRLTTLSWQLFQTLSLRELQLEQNFFNCSCDIRWMQLWQEQGEAKLNSQNLYCINADGSQLPLFRMNISQCDLPEISVSHVNLTVREGDNAVITCNGSGSPLPDVDWIVTGLQSINTHQTNLNWTNVHAINLTLVNVTSEDNGFTLTCIAENVVGMSNASVALTVYYPPRVVSLEEPELRLEHCIEFVVRGNPPPTLHWLHNGQPLRESKIIHVEYYQEGEISEGCLLFNKPTHYNNGNYTLIAKNPLGTANQTINGHFLKEPFPESTDNFILFDEVSPTPPITVTHKPEEDTFGVSIAVGLAAFACVLLVVLFVMINKYGRRSKFGMKDVQHIKRRDIVLKRELGEGAFGKVFLAECYNLSPTKDKMLVAVKALKDPTLAARKDFQREAELLTNLQHEHIVKFYGVCGDGDPLIMVFEYMKHGDLNKFLRAHGPDAMILVDGQPRQAKGELGLSQMLHIASQIASGMVYLASQHFVHRDLATRNCLVGANLLVKIGDFGMSRDVYSTDYYRVGGHTMLPIRWMPPESIMYRKFTTESDVWSFGVILWEIFTYGKQPWFQLSNTEVIECITQGRVLERPRVCPKEVYDVMLGCWQREPQQRLNIKEIYKILHALGKATPIYLDILG

SEQ ID NO: 609 - protein, 839 aa, Homo sapiens
MDVSLCPAKCSFWRIFLLGSVWLDYVGSVLACPANCVCSKTEINCRRPDDGNLFPLLEGQDSGNSNGNASINITDISRNITSIHIENWRSLHTLNAVDMELYTGLQKLTIKNSGLRSIQPRAFAKNPHLRYINLSSNRLTTLSWQLFQTLSLRELQLEQNFFNCSCDIRWMQLWQEQGEAKLNSQNLYCINADGSQLPLFRMNISQCDLPEISVSHVNLTVREGDNAVITCNGSGSPLPDVDWIVTGLQSINTHQTNLNWTNVHAINLTLVNVTSEDNGFTLTCIAENVVGMSNASVALTVYYPPRVVSLEEPELRLEHCIEFVVRGNPPPTLHWLHNGQPLRESKIIHVEYYQEGEISEGCLLFNKPTHYNNGNYTLIAKNPLGTANQTINGHFLKEPFPESTDNFILFDEVSPTPPITVTHKPEEDTFGVSIAVGLAAFACVLLVVLFVMINKYGRRSKFGMKGPVAVISGEEDSASPLHHINHGITTPSSLDAGPDTVVIGMTRIPVIENPQYFRQGHNCHKPDTYVQHIKRRDIVLKRELGEGAFGKVFLAECYNLSPTKDKMLVAVKALKDPTLAARKDFQREAELLTNLQHEHIVKFYGVCGDGDPLIMVFEYMKHGDLNKFLRAHGPDAMILVDGQPRQAKGELGLSQMLHIASQIASGMVYLASQHFVHRDLATRNCLVGANLLVKIGDFGMSRDVYSTDYYRLFNPSGNDFCIWCEVGGHTMLPIRWMPPESIMYRKFTTESDVWSFGVILWEIFTYGKQPWFQLSNTEVIECITQGRVLERPRVCPKEVYDVMLGCWQREPQQRLNIKEIYKILHALGKATPIYLDILG

SEQ ID NO: 610 - protein, 1089 aa, Homo sapiens
MGTSHPAFLVLGCLLTGLSLILCQLSLPSILPNENEKVVQLNSSFSLRCFGESEVSWQYPMSEEESSDVEIRNEENNSGLFVTVLEVSSASAAHTGLYTCYYNHTQTEENELEGRHIYIYVPDPDVAFVPLGMTDYLVIVEDDDSAIIPCRTTDPETPVTLHNSEGVVPASYDSRQGFNGTFTVGPYICEATVKGKKFQTIPFNVYALKATSELDLEMEAFKTVYKSGETIVVTCAVFNNEVVDLQWTYPGEVKGKGITMLEEIKVPSIKLVYTLTVPEATVKDSGDYECAARQATREVKEMKKVTISVHEKGFIEIKPTFSQLEAVNLHEVKHFVVEVRAYPPPRISWLKNNLTLIENLTEITTDVEKIQEIRYRSKLKLIRAKEEDSGHYTIVAQNEDAVKSYTFELLTQVPSSILDLVDDHHGSTGGQTVRCTAEGTPLPDIEWMICKDIKKCNNETSWTILANNVSNIITEIHSRDRSTVEGRVTFAKVEETIAVRCLAKNLLGAENRELKLVAPTLRSELTVAAAVLVLLVIVIISLIVLVVIWKQKPRYEIRWRVIESISPDGHEYIYVDPMQLPYDSRWEFPRDGLVLGRVLGSGAFGKVVEGTAYGLSRSQPVMKVAVKMLKPTARSSEKQALMSELKIMTHLGPHLNIVNLLGACTKSGPIYIITEYCFYGDLVNYLHKNRDSFLSHHPEKPKKELDIFGLNPADESTRSYVILSFENNGDYMDMKQADTTQYVPMLERKEVSKYSDIQRSLYDRPASYKKKSMLDSEVKNLLSDDNSEGLTLLDLLSFTYQVARGMEFLASKNCVHRDLAARNVLLAQGKIVKICDFGLARDIMHDSNYVSKGSTFLPVKWMAPESIFDNLYTTLSDVWSYGILLWEIFSLGGTPYPGMMVDSTFYNKIKSGYRMAKPDHATSEVYEIMVKCWNSEPEKRPSFYHLSEIVENLLPGQYKKSYEKIHLDFLKSDHPAVARMRVDSDNAYIGVTYKNEEDKLKDWEGGLDEQRLSADSGYIIPLPDIDPVPEEEDLGKRNRHSSQTSEESAIETGSSSSTFIKREDETIEDIDMMDDIGIDSSDLVEDSFL

SEQ ID NO: 611 - protein, 1089 aa, Homo sapiens [sequence omitted]

SEQ ID NO: 612 - protein, 1106 aa, Homo sapiens [sequence omitted]

SEQ ID NO: 613 - protein, 1106 aa, Homo sapiens
MRLPGAMPALALKGELLLLSLLLLLEPQISQGLVVTPPGPELVLNVSSTFVLTCSGSAPVVWERMSQEPPQEMAKAQDGTFSSVLTLTNLTGLDTGEYFCTHNDSRGLETDERKRLYIFVPDPTVGFLPNDAEELFIFLTEITEITIPCRVTDPQLVVTLHEKKGDVALPVPYDHQRGFSGIFEDRSYICKTTIGDREVDSDAYYVYRLQVSSINVSVNAVQTVVRQGENITLMCIVIGNEVVNFEWTYPRKESGRLVEPVTDFLLDMPYHIRSILHIPSAELEDSGTYTCNVTESVNDHQDEKAINITVVESGYVRLLGEVGTLQFAELHRSRTLQVVFEAYPPPTVLWFKDNRTLGDSSAGEIALSTRNVSETRYVSELTLVRVKVAEAGHYTMRAFHEDAEVQLSFQLQINVPVRVLELSESHPDSGEQTVRCRGRGMPQPNIIWSACRDLKRCPRELPPMLLGNSSEEESQLETNVTYWEEEQEFEVVSTLRLQHVDRPLSVRCTLRNAVGQDTQEVIVVPHSLPFKVVVISAILALVVLTIISLIILIMLWQKKPRYEIRWKVIESVSSDGHEYIYVDPMQLPYDSTWELPRDQLVLGRTLGSGAFGQVVEATAHGLSHSQATMKVAVKMLKSTARSSEKQALMSELKIMSHLGPHLNVVNLLGACTKGGPIYIITEYCRYGDLVDYLHRNKHTFLQHHSDKRRPPSAELYSNALPVGLPLPSHVSLTGESDGGYMDMSKDESVDYVPMLDMKGDVKYADIESSNYMAPYDNYVPSAPERTCRATLINESPVLSYMDLVGFSYQVANGMEFLASKNCVHRDLAARNVLICEGKLVKICDFGLARDIMRDSNYISKGSTFLPLKWMAPESIFNSLYTTLSDVWSFGILLWEIFTLGGTPYPELPMNEQFYNAIKRGYRMAQPAHASDEIYEIMQKCWEEKFEIRPPFSQLVLLLERLLGEGYKKKYQQVDEEFLRSDHPAILRSQARLPGFHGLRSPLDTSSVLYTAVQPNEGDNDYIIPLPDPKPEVADEGPLEGSPSLASSTLNEVNTSSTISCDSPLEPQDEPEPEPQLELQVEPEPELEQLPDSGCPAPRAEAEDSFL

SEQ ID NO: 614 - protein, 391 aa, Homo sapiens
MTRRGRRRSSHFLGPPAGAAGCTQRRSRELAAAAMSHQTGIQASEDVKEIFARARNGKYRLLKISIENEQLVIGSYSQPSDSWDKDYDSFVLPLLEDKQPCYILFRLDSQNAQGYEWIFIAWSPDHSHVRQKMLYAATRATLKKEFGGGHIKDEVFGTVKEDVSLHGYKKYLLSQSSPAPLTAAEEELRQIKINERPEDHIGVQTDVGVDTKHQTLQGVAFPISREAFQALEKLNNRQLNYVQLEIDIKNEIIILANTTNTELKDLPKRIPKDSARYHFFLYKHSHEGDYLESIVFIYSMPGYTCSIRERMLYSSCKSRLLEIVERQLQMDVIRKIEIDNGDELTADFLYEEVHPKQHAHKQSFAKPKGPAGKRGIRRLIRGPAETEATTD

SEQ ID NO: 615 - protein, 1009 aa, Homo sapiens
MSGVSEPLSRVKLGTLRRPEGPAEPMVVVPVDVEKEDVRILKVCFYSNSFNPGKNFKLVKCTVQTEIREIITSILLSGRIGPNIRLAECYGLRLKHMKSDEIHWLHPQMTVGEVQDKYECLHVEAEWRYDLQIRYLPEDFMESLKEDRTTLLYFYQQLRNDYMQRYASKVSEGMALQLGCLELRRFFKDMPHNALDKKSNFELLEKEVGLDLFFPKQMQENLKPKQFRKMIQQTFQQYASLREEECVMKFFNTLAGFANIDQETYRCELIQGWNITVDLVIGPKGIRQLTSQDAKPTCLAEFKQIRSIRCLPLEEGQAVLQLGIEGAPQALSIKTSSLAEAENMADLIDGYCRLQGEHQGSLIIHPRKDGEKRNSLPQIPMLNLEARRSHLSESCSIESDIYAEIPDETLRRPVGPQYGIAREDVVLNRILGEGFFGEVYEGVYTNHKGEKINVAVKTCKKDCTLDNKEKFMSEAVIMKNLDHPHIVKLIGIIEEEPTWIIMELYPYGELGHYLERNKNSLKVLTLVLYSLQICKAMAYLESINCVHRDIAVRNILVASPECVKLGDFGLSRYIEDEDYYKASVTRLPIKWMSPESINFRRFTTASDVWMFAVCMWEILSFGKQPFFWLENKDVIGVLEKGDRLPKPDLCPPVLYTLMTRCWDYDPSDRPRFTELVCSLSDVYQMEKDIAMEQERNARYRTPKILEPTAFQEPPPKPSRPKYRPPPQTNLLAPKLQFQVPEGLCASSPTLTSPMEYPSPVNSLHTPPLHRHNVFKRHSMREEDFIQPSSREEAQQLWEAEKVKMRQILDKQQKQMVEDYQWLRQEEKSLDPMVYMNDKSPLTPEKEVGYLEFTGPPQKPPRLGAQSIQPTANLDRTDDLVYLNVMELVRAVLELKNELCQLPPEGYVVVVKNVGLTLRKLIGSVDDLLPSLPSSSRTEIEGTQKLLNKDLAELINKMRLAQQNAVTSLSEECKRQMLTASHTLAVDAKNLLDAVDQAKVLANLAHPPAE

SEQ ID NO: 616 - protein, 967 aa, Homo sapiens
MSGVSEPLSRVKLGTLRRPEGPAEPMVVVPVDVEKEDVRILKVCFYSNSFNPGKNFKLVKCTVQTEIREIITSILLSGRIGPNIRLAECYGLRLKHMKSDEIHWLHPQMTVGEVQDKYECLHVEAEWRYDLQIRYLPEDFMESLKEDRTTLLYFYQQLRNDYMQRYASKVSEGMALQLGCLELRRFFKDMPHNALDKKSNFELLEKEVGLDLFFPKQMQENLKPKQFRKMIQQTFQQYASLREEECVMKFFNTLAGFANIDQETYRCELIQGWNITVDLVIGPKGIRQLTSQDAKPTCLAEFKQIRSIRCLPLEEGQAVLQLGIEGAPQALSIKTSSLAEAENMADLIDGYCRLQGEHQGSLIIHPRKDGEKRNSLPQIPMLNLEARRSHLSESCSIESDIYAEIPDETLRRPGGPQYGIAREDVVLNRILGEGFFGEVYEGVYTNHKGEKINVAVKTCKKDCTLDNKEKFMSEAVIMKNLDHPHIVKLIGIIEEEPTWIIMELYPYGELGHYLERNKNSLKVLTLVLYSLQICKAMAYLESINCVHRDIAVRNILVASPECVKLGDFGLSRYIEDEDYYKASVTRLPIKWMSPESINFRRFTTASDVWMFAVCMWEILSFGKQPFFWLENKDVIGVLEKGDRLPKPDLCPPVLYTLMTRCWDYDPSDRPRFTELVCSLSDVYQMEKDIAMEQERNARYRTPKILEPTAFQEPPPKPSRPKYRPPPQTNLLAPKLQFQEEDFIQPSSREEAQQLWEAEKVKMRQILDKQQKQMVEDYQWLRQEEKSLDPMVYMNDKSPLTPEKEVGYLEFTGPPQKPPRLGAQSIQPTANLDRTDDLVYLNVMELVRAVLELKNELCQLPPEGYVVVVKNVGLTLRKLIGSVDDLLPSLPSSSRTEIEGTQKLLNKDLAELINKMRLAQQNAVTSLSEECKRQMLTASHTLAVDAKNLLDAVDQAKVLANLAHPPAE

SEQ ID NO: 617 - protein, 1009 aa, Homo sapiens
MSGVSEPLSRVKLGTLRRPEGPAEPMVVVPVDVEKEDVRILKVCFYSNSFNPGKNFKLVKCTVQTEIREIITSILLSGRIGPNIRLAECYGLRLKHMKSDEIHWLHPQMTVGEVQDKYECLHVEAEWRYDLQIRYLPEDFMESLKEDRTTLLYFYQQLRNDYMQRYASKVSEGMALQLGCLELRRFFKDMPHNALDKKSNFELLEKEVGLDLFFPKQMQENLKPKQFRKMIQQTFQQYASLREEECVMKFFNTLAGFANIDQETYRCELIQGWNITVDLVIGPKGIRQLTSQDAKPTCLAEFKQIRSIRCLPLEEGQAVLQLGIEGAPQALSIKTSSLAEAENMADLIDGYCRLQGEHQGSLIIHPRKDGEKRNSLPQIPMLNLEARRSHLSESCSIESDIYAEIPDETLRRPGGPQYGIAREDVVLNRILGEGFFGEVYEGVYTNHKGEKINVAVKTCKKDCTLDNKEKFMSEAVIMKNLDHPHIVKLIGIIEEEPTWIIMELYPYGELGHYLERNKNSLKVLTLVLYSLQICKAMAYLESINCVHRDIAVRNILVASPECVKLGDFGLSRYIEDEDYYKASVTRLPIKWMSPESINFRRFTTASDVWMFAVCMWEILSFGKQPFFWLENKDVIGVLEKGDRLPKPDLCPPVLYTLMTRCWDYDPSDRPRFTELVCSLSDVYQMEKDIAMEQERNARYRTPKILEPTAFQEPPPKPSRPKYRPPPQTNLLAPKLQFQVPEGLCASSPTLTSPMEYPSPVNSLHTPPLHRHNVFKRHSMREEDFIQPSSREEAQQLWEAEKVKMRQILDKQQKQMVEDYQWLRQEEKSLDPMVYMNDTSPLTPEKEVGYLEFTGPPQKPPRLGAQSIQPTANLDRTDDLVYLNVMELVRAVLELKNELCQLPPEGYVVVVKNVGLTLRKLIGSVDDLLPSLPSSSRTEIEGTQKLLNKDLAELINKMRLAQQNAVTSLSEECKRQMLTASHTLAVDAKNLLDAVDQAKVLANLAHPPAE

SEQ ID NO: 618 - protein, 1114 aa, Homo sapiens
MAKATSGAAGLRLLLLLLLPLLGKVALGLYFSRDAYWEKLYVDQAAGTPLLYVHALRDAPEEVPSFRLGQHLYGTYRTRLHENNWICIQEDTGLLYLNRSLDHSSWEKLSVRNRGFPLLTVYLKVFLSPTSLREGECQWPGCARVYFSFFNTSFPACSSLKPRELCFPETRPSFRIRENRPPGTFHQFRLLPVQFLCPNISVAYRLLEGEGLPFRCAPDSLEVSTRWALDREQREKYELVAVCTVHAGAREEVVMVPFPVTVYDEDDSAPTFPAGVDTASAVVEFKRKEDTVVATLRVFDADVVPASGELVRRYTSTLLPGDTWAQQTFRVEHWPNETSVQANGSFVRATVHDYRLVLNRNLSISENRTMQLAVLVNDSDFQGPGAGVLLLHFNVSVLPVSLHLPSTYSLSVSRRARRFAQIGKVCVENCQAFSGINVQYKLHSSGANCSTLGVVTSAEDTSGILFVNDTKALRRPKCAELHYMVVATNQQTSRQAQAQLLVTVEGSYVAEEAGCPLSCAVSKRRLECEECGGLGSPTGRCEWRQGDGKGITRNFSTCSPSTKTCPDGHCDVVETQDINICPQDCLRGSIVGGHEPGEPRGIKAGYGTCNCFPEEEKCFCEPEDIQDPLCDELCRTVIAAAVLFSFIVSVLLSAFCIHCYHKFAHKPPISSAEMTFRRPAQAFPVSYSSSGARRPSLDSMENQVSVDAFKILEDPKWEFPRKNLVLGKTLGEGEFGKVVKATAFHLKGRAGYTTVAVKMLKENASPSELRDLLSEFNVLKQVNHPHVIKLYGACSQDGPLLLIVEYAKYGSLRGFLRESRKVGPGYLGSGGSRNSSSLDHPDERALTMGDLISFAWQISQGMQYLAEMKLVHRDLAARNILVAEGRKMKISDFGLSRDVYEEDSYVKRSQGRIPVKWMAIESLFDHIYTTQSDVWSFGVLLWEIVTLGGNPYPGIPPERLFNLLKTGHRMERPDNCSEEMYRLMLQCWKQEPDKRPVFADISKDLEKMMVKRRDYLDLAASTPSDSLIYDDGLSEEETPLVDCNNAPLPRALPSTWIENKLYGMSDPNWPGESPVPLTRADGTNTGFPRYPNDSVYANWMLSPSAAKLMDTFDS

SEQ ID NO: 619 - protein, 1114 aa, Homo sapiens
MAKATSGAAGLRLLLLLLLPLLGKVALGLYFSRDAYWEKLYVDQAAGTPLLYVHALRDAPEEVPSFRLGQHLYGTYRTRLHENNWICIQEDTGLLYLNRSLDHSSWEKLSVRNRGFPLLTVYLKVFLSPTSLREGECQWPGCARVYFSFFNTSFPACSSLKPRELCFPETRPSFRIRENRPPGTFHQFRLLPVQFLCPNISVAYRLLEGEGLPFRCAPDSLEVSTRWALDREQREKYELVAVCTVHAGAREEVVMVPFPVTVYDEDDSAPTFPAGVDTASAVVEFKRKEDTVVATLRVFDADVVPASGELVRRYTSTLLPGDTWAQQTFRVEHWPNETSVQANGSFVRATVHDYRLVLNRNLSISENRTMQLAVLVNDSDFQGPGAGVLLLHFNVSVLPVSLHLPSTYSLSVSRRARRFAQIGKVCVENCQAFSGINVQYKLHSSGANCSTLGVVTSAEDTSGILFVNDTKALRRPKCAELHYMVVATDQQTSRQAQAQLLVTVEGSYVAEEAGCPLSCAVSKRRLECEECGGLGSPTGRCEWRQGDGKGITRNFSTCSPSTKTCPDGHCDVVETQDINICPQDCLRGSIVGGHEPGEPRGIKAGYGTCNCFPEEEKCFCEPEDIQDPLCDELCRTVIAAAVLFSFIVSVLLSAFCIHCYHKFAHKPPISSAEMTFRRPAQAFPVSYSSSSARRPSLDSMENQVSVDAFKILEDPKWEFPRKNLVLGKTLGEGEFGKVVKATAFHLKGRAGYTTVAVKMLKENASPSELRDLLSEFNVLKQVNHPHVIKLYGACSQDGPLLLIVEYAKYGSLRGFLRESRKVGPGYLGSGGSRNSSSLDHPDERALTMGDLISFAWQISQGMQYLAEMKLVHRDLAARNILVAEGRKMKISDFGLSRDVYEEDSYVKRSQGRIPVKWMAIESLFDHIYTTQSDVWSFGVLLWEIVTLGGNPYPGIPPERLFNLLKTGHRMERPDNCSEEMYRLMLQCWKQEPDKRPVFADISKDLEKMMVKRRDYLDLAASTPSDSLIYDDGLSEEETPLVDCNNAPLPRALPSTWIENKLYGMSDPNWPGESPVPLTRADGTNTGFPRYPNDSVYANWMLSPSAAKLMDTFDS

SEQ ID NO: 620 - protein, 1114 aa, Homo sapiens
MAKATSGAAGLRLLLLLLLPLLGKVALGLYFSRDAYWEKLYVDQAAGTPLLYVHALRDAPEEVPSFRLGQHLYGTYRTRLHENNWICIQEDTGLLYLNRSLDHSSWEKLSVRNRGFPLLTVYLKVFLSPTSLREGECQWPGCARVYFSFFNTSFPACSSLKPRELCFPETRPSFRIRENRPPGTFHQFRLLPVQFLCPNISVAYRLLEGEGLPFRCAPDSLEVSTRWALDREQREKYELVAVCTVHAGAREEVVMVPFPVTVYDEDDSAPTFPAGVDTASAVVEFKRKEDTVVATLRVFDADVVPASGELVRRYTSTLLPGDTWAQQTFRVEHWPNETSVQANGSFVRATVHDYRLVLNRNLSISENRTMQLAVLVNDSDFQGPGAGVLLLHFNVSVLPVSLHLPSTYSLSVSRRARRFAQIGKVCVENCQAFSGINVQYKLHSSGANCSTLGVVTSAEDTSGILFVNDTKALRRPKCAELHYMVVATDQQTSRQAQAQLLVTVEGSYVAEEAGCPLSCAVSKRRLECEECGGLGSPTGRCEWRQGDGKGITRNFSTCSPSTKTCPDGHCDVVETQDINICPQDCLRGSIVGGHEPGEPRGIKAGYGTCNCFPEEEKCFCEPEDIQDPLCDELCRTVIAAAVLFSFIVSVLLSAFCIHCYHKFAHKPPISSAEMTFRRPAQAFPVSYSSSGARRPSLDSMENQVSVDAFKILEDPKWEFPRKNLVLGKTLGEGEFGKVVKATAFHLKGRAGYTTVAVKMLKENASPSELRDLLSEFNVLKQVNHPHVIKLYGACSQDGPLLLIVEYAKYGSLRGFLRESRKVGPGYLGSGGSRNSSSLDHPDERALTMGDLISFAWQISQGMQYLAEMKLVHRDLAARNILVAEGRKMKISDFGLSRDVYEEDSYVKRSQGRIPVKWMAIESLFDHIYTTQSDVWSFGVLLWEIVTLGGNPYPGIPPERLFNLLKTGHRMERPDNCSEEMYCLMLQCWKQEPDKRPVFADISKDLEKMMVKRRDYLDLAASTPSDSLIYDDGLSEEETPLVDCNNAPLPRALPSTWIENKLYGMSDPNWPGESPVPLTRADGTNTGFPRYPNDSVYANWMLSPSAAKLMDTFDS

SEQ ID NO: 621 - protein, 1400 aa, Homo sapiens
MELLPPLPQSFLLLLLLPAKPAAGEDWQCPRTPYAASRDFDVKYVVPSFSAGGLVQAMVTYEGDRNESAVFVAIRNRLHVLGPDLKSVQSLATGPAGDPGCQTCAACGPGPHGPPGDTDTKVLVLDPALPALVSCGSSLQGRCFLHDLEPQGTAVHLAAPACLFSAHHNRPDDCPDCVASPLGTRVTVVEQGQASYFYVASSLDAAVAGSFSPRSVSIRRLKADASGFAPGFVALSVLPKHLVSYSIEYVHSFHTGAFVYFLTVQPASVTDDPSALHTRLARLSATEPELGDYRELVLDCRFAPKRRRRGAPEGGQPYPVLQVAHSAPVGAQLATELSIAEGQEVLFGVFVTGKDGGPGVGPNSVVCAFPIDLLDTLIDEGVERCCESPVHPGLRRGLDFFQSPSFCPNPPGLEALSPNTSCRHFPLLVSSSFSRVDLFSGLLGPVQVTALYVTRLDNVTVAHMGTMDGRILQVELVRSLNYLLYVSNFSLGDSGQPVQRDVSRLGDHLLFASGDQVFQVPIRGPGCRHFLTCGRCLRAWHFMGCGWCGNMCGQQKECPGSWQQDHCPPKLTEFHPHSGPLRGSTRLTLCGSNFYLHPSGLVPEGTHQVTVGQSPCRPLPKDSSKLRPVPRKDFVEEFECELEPLGTQAVGPTNVSLTVTNMPPGKHFRVDGTSVLRGFSFMEPVLIAVQPLFGPRAGGTCLTLEGQSLSVGTSRAVLVNGTECLLARVSEGQLLCATPPGATVASVPLSLQVGGAQVPGSWTFQYREDPVVLSISPNCGYINSHITICGQHLTSAWHLVLSFHDGLRAVESRCERQLPEQQLCRLPEYVVRDPQGWVAGNLSARGDGAAGFTLPGFRFLPPPHPPSANLVPLKPEEHAIKFEYIGLGAVADCVGINVTVGGESCQHEFRGDMVVCPLPPSLQLGQDGAPLQVCVDGECHILGRVVRPGPDGVPQSTLLGILLPLLLLVAALATALVFSYWWRRKQLVLPPNLNDLASLDQTAGATPLPILYSGSDYRSGLALPAIDGLDSTTCVHGASFSDSEDESCVPLLRKESIQLRDLDSALLAEVKDVLIPHERVVTHSDRVIGKGHFGVVYHGEYIDQAQNRIQCAIKSLSRITEMQQVEAFLREGLLMRGLNHPNVLALIGIMLPPEGLPHVLLPYMCHGDLLQFIRSPQRNPTVKDLISFGLQVARGMEYLAEQKFVHRDLAARNCMLDESFTVKVADFGLARDILDREYYSVQQHRHARLPVKWMALESLQTYRFTTKSDVWSFGVLLWELLTRGAPPYRHIDPFDLTHFLAQGRRLPQPEYCPDSLYQVMQQCWEADPAVRPTFRVLVGEVEQIVSALLGDHYVQLPATYMNLGPSTSHEMNVRPEQPQFSPMPGNVRRPRPLSEPPRPT

SEQ ID NO: 622 - protein, 1357 aa, Homo sapiens
MELLPPLPQSFLLLLLLPAKPAAGEDWQCPRTPYAASRDFDVKYVVPSFSAGGLVQAMVTYEGDRNESAVFVAIRNRLHVLGPDLKSVQSLATGPAGDPGCQTCAACGPGPHGPPGDTDTKVLVLDPALPALVSCGSSLQGRCFLHDLEPQGTAVHLAAPACLFSAHHNRPDDCPDCVASPLGTRVTVVEQGQASYFYVASSLDAAVAGSFSPRSVSIRRLKADASGFAPGFVALSVLPKHLVSYSIEYVHSFHTGAFVYFLTVQPASVTDDPSALHTRLARLSATEPELGDYRELVLDCRFAPKRRRRGAPEGGQPYPVLQVAHSAPVGAQLATELSIAEGQEVLFGVFVTGKDGGPGVGPNSVVCAFPIDLLDTLIDEGVERCCESPVHPGLRRGLDFFQSPSFCPNPPGLEALSPNTSCRHFPLLVSSSFSRVDLFNGLLGPVQVTALYVTRLDNVTVAHMGTMDGRILQVFQVPIRGPGCRHFLTCGRCLRAWHFMGCGWCGNMCGQQKECPGSWQQDHCPPKLTEFHPHSGPLRGSTRLTLCGSNFYLHPSGLVPEGTHQVTVGQSPCRPLPKDSSKLRPVPRKDFVEEFECELEPLGTQAVGPTNVSLTVTNMPPGKHFRVDGTSVLRGFSFMEPVLIAVQPLFGPRAGGTCLTLEGQSLSVGTSRAVLVNGTECLLARVSEGQLLCATPPGATVASVPLSLQVGGAQVPGSWTFQYREDPVVLSISPNCGYINSHITICGQHLTSAWHLVLSFHDGLRAVESRCERQLPEQQLCRLPEYVVRDPQGWVAGNLSARGDGAAGFTLPGFRFLPPPHPPSANLVPLKPEEHAIKFEYIGLGAVADCVGINVTVGGESCQHEFRGDMVVCPLPPSLQLGQDGAPLQVCVDGECHILGRVVRPGPDGVPQSTLLGILLPLLLLVAALATALVFSYWWRRKQLVLPPNLNDLASLDQTAGATPLPILYSGSDYRSGLALPAIDGLDSTTCVHGASFSDSEDESCVPLLRKESIQLRDLDSALLAEVKDVLIPHERVVTHSDRVIGKGHFGVVYHGEYIDQAQNRIQCAIKSLSRITEMQQVEAFLREGLLMRGLNHPNVLALIGIMLPPEGLPHVLLPYMCHGDLLQFIRSPQRNPTVKDLISFGLQVARGMEYLAEQKFVHRDLAARNCMLDESFTVKVADFGLARDILDREYYSVQQHRHARLPVKWMALESLQTYRFTTKSDVWSFGVLLWELLTRGAPPYRHIDPFDLTHFLAQGRRLPQPEYCPDSLYQVMQQCWEADPAVRPTFRVLVGEVEQIVSALLGDHYVQLPATYMNLGPSTSHEMNVRPEQPQFSPMPGNVRRPRPLSEPPRPT

SEQ ID NO: 623 - protein, 1400 aa, Homo sapiens
MELLPPLPQSFLLLLLLPAKPAAGEDWQCPRTPYAASRDFDVKYVVPSFSAGGLVQAMVTYEGDRNESAVFVAIRNRLHVLGPDLKSVQSLATGPAGDPGCQTCAACGPGPHGPPGDTDTKVLVLDPALPALVSCGSSLQGRCFLHDLEPQGTAVHLAAPACLFSAHHNRPDDCPDCVASPLGTRVTVVEQGQASYFYVASSLDAAVAGSFSPRSVSIRRLKADASGFAPGFVALSVLPKHLVSYSIEYVHSFHTGAFVYFLTVQPASVTDDPSALHTRLARLSATEPELGDYRELVLDCRFAPKRRRRGAPEGGQPYPVLQVAHSAPVGAQLATELSIAEGQEVLFGVFVTGKDGGPGVGPNSVVCAFPIDLLDTLIDEGVERCCESPVHPGLRRGLDFFQSPSFCPNPPGLEALSPNTSCRHFPLLVSSSFSRVDLFNGLLGPVQVTALYVTRLDNVTVAHMGTMDGRILQVELVRSLNYLLYVSNFSLGDSGQPVQRDVSRLGDHLLFASGDQVFQVPIQGPGCRHFLTCGRCLRAWHFMGCGWCGNMCGQQKECPGSWQQDHCPPKLTEFHPHSGPLRGSTRLTLCGSNFYLHPSGLVPEGTHQVTVGQSPCRPLPKDSSKLRPVPRKDFVEEFECELEPLGTQAVGPTNVSLTVTNMPPGKHFRVDGTSVLRGFSFMEPVLIAVQPLFGPRAGGTCLTLEGQSLSVGTSRAVLVNGTECLLARVSEGQLLCATPPGATVASVPLSLQVGGAQVPGSWTFQYREDPVVLSISPNCGYINSHITICGQHLTSAWHLVLSFHDGLRAVESRCERQLPEQQLCRLPEYVVRDPQGWVAGNLSARGDGAAGFTLPGFRFLPPPHPPSANLVPLKPEEHAIKFEYIGLGAVADCVGINVTVGGESCQHEFRGDMVVCPLPPSLQLGQDGAPLQVCVDGECHILGRVVRPGPDGVPQSTLLGILLPLLLLVAALATALVFSYWWRRKQLVLPPNLNDLASLDQTAGATPLPILYSGSDYRSGLALPAIDGLDSTTCVHGASFSDSEDESCVPLLRKESIQLRDLDSALLAEVKDVLIPHERVVTHSDRVIGKGHFGVVYHGEYIDQAQNRIQCAIKSLSRITEMQQVEAFLREGLLMRGLNHPNVLALIGIMLPPEGLPHVLLPYMCHGDLLQFIRSPQRNPTVKDLISFGLQVARGMEYLAEQKFVHRDLAARNCMLDESFTVKVADFGLARDILDREYYSVQQHRHARLPVKWMALESLQTYRFTTKSDVWSFGVLLWELLTRGAPPYRHIDPFDLTHFLAQGRRLPQPEYCPDSLYQVMQQCWEADPAVRPTFRVLVGEVEQIVSALLGDHYVQLPATYMNLGPSTSHEMNVRPEQPQFSPMPGNVRRPRPLSEPPRPT

SEQ ID NO: 624 - protein, 648 aa, Homo sapiens
MELLPPLPQSFLLLLLLPAKPAAGEDWQCPRTPYAASRDFDVKYVVPSFSAGGLVQAMVTYEGDRNESAVFVAIRNRLHVLGPDLKSVQSLATGPAGDPGCQTCAACGPGPHGPPGDTDTKVLVLDPALPALVSCGSSLQGRCFLHDLEPQGTAVHLAAPACLFSAHHNRPDDCPDCVASPLGTRVTVVEQGQASYFYVASSLDAAVAGSFSPRSVSIRRLKADASGFAPGFVALSVLPKHLVSYSIEYVHSFHTGAFVYFLTVQPASVTDDPSALHTRLARLSATEPELGDYRELVLDCRFAPKRRRRGAPEGGQPYPVLQVAHSAPVGAQLATELSIAEGQEVLFGVFVTGKDGGPGVGPNSVVCAFPIDLLDTLIDEGVERCCESPVHPGLRRGLDFFQSPSFCPNPPGLEALSPNTSCRHFPLLVSSSFSRVDLFNGLLGPVQVTALYVTRLDNVTVAHMGTMDGRILQVELVRSLNYLLYVSNFSLGDSGQPVQRDVSRLGDHLLFASGDQVFQVPIRGPGCRHFLTCGRCLRAWHFMGCGWCGNMCGQQKECPGSWQQDHCPPKLTEFHPHSGPLRGSTRLTLCGSNFYLHPSGLVPEGTHQVTVGQSPCRPLPKDSSKLGASADSSATPLWPTGRRHLSHS

SEQ ID NO: 625 - protein, 1401 aa, Homo sapiens
MELLPPLPQSFLLLLLLPAKPAAGEDWQCPRTPYAASRDFDVKYVVPSFSAGGLVQAMVTYEGDRNESAVFVAIRNRLHVLGPDLKSVQSLATGPAGDPGCQTCAACGPGPHGPPGDTDTKVLVLDPALPALVSCGSSLQGRCFLHDLEPQGTAVHLAAPACLFSAHHNRPDDCPDCVASPLGTRVTVVEQGQASYFYVASSLDAAVAGSFSPRSVSIRRLKADASGFAPGFVALSVLPKHLVSYSIEYVHSFHTGAFVYFLTVQPASVTDDPSALHTRLARLSATEPELGDYRELVLDCRFAPKRRRRGAPEGGQPYPVLQVAHSAPVGAQLATELSIAEGQEVLFGVFVTGKDGGPGVGPNSVVCAFPIDLLDTLIDEGVERCCESPVHPGLRRGLDFFQSPSFCPNPPGLEALSPNTSCRHFPLLVSSSFSRVDLFNGLLGPVQVTALYVTRLDNVTVAHMGTMDGRILQVELVRSLNYLLYVSNFSLGDSGQPVQRDVSRLGDHLLFASGDQVFQVPIRGPGCRHFLTCGRCLRAWHFMGCGWCGNMCGQQKECPGSWQQDHCPPKLTEFHPHSGPLRGSTRLTLCGSNFYLHPSGLVPEGTHQVTVGQSPCRPLPKDSSKLRPVPRKDFVEEFECELEPLGTQAVGPTNVSLTVTNMPPGKHFRVDGTSVLRGFSFMEPVLIAVQPLFGPRAGGTCLTLEGQSLSVGTSRAVLVNGTECLLARVSEGQLLCATPPGATVASVPLSLQVGGAQVPGSWTFQYREDPVVLSISPNCGYINSHITICGQHLTSAWHLVLSFHDGLRAVESRQCERQLPEQQLCRLPEYVVRDPQGWVAGNLSARGDGAAGFTLPGFRFLPPPHPPSANLVPLKPEEHAIKFEYIGLGAVADCVGINVTVGGESCQHEFRGDMVVCPLPPSLQLGQDGAPLQVCVDGECHILGRVVRPGPDGVPQSTLLGILLPLLLLVAALATALVFSYWWRRKQLVLPPNLNDLASLDQTAGATPLPILYSGSDYRSGLALPAIDGLDSTTCVHGASFSDSEDESCVPLLRKESIQLRDLDSALLAEVKDVLIPHERVVTHSDRVIGKGHFGVVYHGEYIDQAQNRIQCAIKSLSRITEMQQVEAFLREGLLMRGLNHPNVLALIGIMLPPEGLPHVLLPYMCHGDLLQFIRSPQRNPTVKDLISFGLQVARGMEYLAEQKFVHRDLAARNCMLDESFTVKVADFGLARDILDREYYSVQQHRHARLPVKWMALESLQTYRFTTKSDVWSFGVLLWELLTRGAPPYRHIDPFDLTHFLAQGRRLPQPEYCPDSLYQVMQQCWEADPAVRPTFRVLVGEVEQIVSALLGDHYVQLPATYMNLGPSTSHEMNVRPEQPQFSPMPGNVRRPRPLSEPPRPT

SEQ ID NO: 626 - protein, 1351 aa, Homo sapiens
MELLPPLPQSFLLLLLLPAKPAAGEDWQCPRTPYAASRDFDVKYVVPSFSAGGLVQAMVTYEGDRNESAVFVAIRNRLHVLGPDLKSVQSLATGPAGDPGCQTCAACGPGPHGPPGDTDTKVLVLDPALPALVSCGSSLQGRCFLHDLEPQGTAVHLAAPACLFSAHHNRPDDCPDCVASPLGTRVTVVEQGQASYFYVASSLDAAVAGSFSPRSVSIRRLKADASGFAPGFVALSVLPKHLVSYSIEYVHSFHTGAFVYFLTVQPASVTDDPSALHTRLARLSATEPELGDYRELVLDCRFAPKRRRRGAPEGGQPYPVLQVAHSAPVGAQLATELSIAEGQEVLFGVFVTGKDGGPGVGPNSVVCAFPIDLLDTLIDEGVERCCESPVHPGLRRGLDFFQSPSFCPNPPGLEALSPNTSCRHFPLLVSSSFSRVDLFNGLLGPVQVTALYVTRLDNVTVAHMGTMDGRILQVELVRSLNYLLYVSNFSLGDSGQPVQRDVSRLGDHLLFASGDQVFQVPIRGPGCRHFLTCGRCLRAWHFMGCGWCGNMCGQQKECPGSWQQDHCPPKLTEFHPHSGPLRGSTRLTLCGSNFYLHPSGLVPEGTHQVTVGQSPCRPLPKDSSKLRPVPRKDFVEEFECELEPLGTQAVGPTNVSLTVTNMPPGKHFRVDGTSVLRGFSFMEPVLIAVQPLFGPRAGGTCLTLEGQSLSVGTSRAVLVNGTECLLARVSEGQLLCATPPGATVASVPLSLQVGGAQVPGSWTFQYREDPVVLSISPNCGYINSHITICGQHLTSAWHLVLSFHDGLRAVESRCERQLPEQQLCRLPEYVVRDPQGWVAGNLSARGDGAAGFTLPGFRFLPPPHPPSANLVPLKPEEHAIKFEVCVDGECHILGRVVRPGPDGVPQSTLLGILLPLLLLVAALATALVFSYWWRRKQLVLPPNLNDLASLDQTAGATPLPILYSGSDYRSGLALPAIDGLDSTTCVHGASFSDSEDESCVPLLRKESIQLRDLDSALLAEVKDVLIPHERVVTHSDRVIGKGHFGVVYHGEYIDQAQNRIQCAIKSLSRITEMQQVEAFLREGLLMRGLNHPNVLALIGIMLPPEGLPHVLLPYMCHGDLLQFIRSPQRNPTVKDLISFGLQVARGMEYLAEQKFVHRDLAARNCMLDESFTVKVADFGLARDILDREYYSVQQHRHARLPVKWMALESLQTYRFTTKSDVWSFGVLLWELLTRGAPPYRHIDPFDLTHFLAQGRRLPQPEYCPDSLYQVMQQCWEADPAVRPTFRVLVGEVEQIVSALLGDHYVQLPATYMNLGPSTSHEMNVRPEQPQFSPMPGNVRRPRPLSEPPRPT

SEQ ID NO: 627 - protein, 1400 aa, Homo sapiens
MELLPPLPQSFLLLLLLPAKPAAGEDWQCPRTPYAASRDFDVKYVVPSFSAGGLVQAMVTYEGDRNESAVFVAIRNRLHVLGPDLKSVQSLATGPAGDPGCQTCAACGPGPHGPPGDTDTKVLVLDPALPALVSCGSSLQGRCFLHDLEPQGTAVHLAAPACLFSAHHNRPDDCPDCVASPLGTRVTVVEQGQASYFYVASSLDAAVAGSFSPRSVSIRRLKADASGFAPGFVALSVLPKHLVSYSIEYVHSFHTGAFVYFLTVQPASVTDDPSALHTRLARLSATEPELGDYRELVLDCRFAPKRRRRGAPEGGQPYPVLQVAHSAPVGAQLATELSIAEGQEVLFGVFVTGKDGGPGVGPNSVVCAFPIDLLDTLIDEGVERCCESPVHPGLRRGLDFFQSPSFCPNPPGLEALSPNTSCRHFPLLVSSSFSRVDLFNGLLGPVQVTALYVTRLDNVTVAHMGTMDGRILQVELVRSLNYLLYVSNFSLGDSGQPVQRDVSRLGDHLLFASGDQVFQVPIRGPGCRHFLTCGRCLRAWHFMGCGWCGNMCGQQKECPGSWQQDHCPPKLTEFHPHSGPLRGSTRLTLCGSNFYLHPSGLVPEGTHQVTVGQSPCRPLPKDSSKLRPVPRKDFVEEFECELEPLGTQAVGPTNVSLTVTNMPPGKHFRVDGTSVLRGFSFMEPVLIAVQPLFGPRAGGTCLTLEGQSLSVGTSRAVLVNGTECLLARVSEGQLLCATPPGATVASVPLSLQVGGAQVPGSWTFQYREDPVVLSISPNCGYINSHITICGQHLTSAWHLVLSFHDGLRAVESRCERQLPEQQLCRLPEYVVRDPQGWVAGNLSARGDGAAGFTLPGFRFLPPPHPPSANLVPLKPEEHAIKFEYIGLGAVADCVGINVTVGGESCQHEFRGDMVVCPLPPSLQLGQDGAPLQVCVDGECHILGRVVRPGPDGVPQSTLLGILLPLLLLVAALATALVFSYWWRRKQLVLPPNLNDLASLDQTAGATPLPILYSGSDYRSGLALPAIDGLDSTTCVHGASFSDSEDESCVPLLRKESIQLRDLDSALLAEVKDVLIPHERVVTHSDRVIGKGHFGVVYHGEYIDQAQNRIQCAIKSLSRITEMQQVEAFLREGLLMRGLNHPNVLALIGIMLPPEGLPHVLLPYMCHGDLLQFIRSPQRNPTVKDLISFGLQVARGMEYLAEQKFVHRDLAARNCMLDESFTVKVADFGLARDILDREYYSVQQHRHARLPVKWMALESLQTYRFTTKSDVWSFGVLLWELLTRGAPPYRHIDPFDLTHFLAQGRRLPQPEYCPDSLYQVMQQCWEADPAVRPTFGVLVGEVEQIVSALLGDHYVQLPATYMNLGPSTSHEMNVRPEQPQFSPMPGNVRRPRPLSEPPRPT

SEQ ID NO: 628 - protein, 937 aa, Homo sapiens
MHRPRRRGTRPPLLALLAALLLAARGAAAQETELSVSAELVPTSSWNISSELNKDSYLTLDEPMNNITTSLGQTAELHCKVSGNPPPTIRWFKNDAPVVQEPRRLSFRSTIYGSRLRIRNLDTTDTGYFQCVATNGKEVVSSTGVLFVKFGPPPTASPGYSDEYEEDGFCQPYRGIACARFIGNRTVYMESLHMQGEIENQITAAFTMIGTSSHLSDKCSQFAIPSLCHYAFPYCDETSSVPKPRDLCRDECEILENVLCQTEYIFARSNPMILMRLKLPNCEDLPQPESPEAANCIRIGIPMADPINKNHKCYNSTGVDYRGTVSVTKSGRQCQPWNSQYPHTHTFTALRFPELNGGHSYCRNPGNQKEAPWCFTLDENFKSDLCDIPACDSKDSKEKNKMEILYILVPSVAIPLAIALLFFFICVCRNNQKSSSAPVQRQPKHVRGQNVEMSMLNAYKPKSKAKELPLSAVRFMEELGECAFGKIYKGHLYLPGMDHAQLVAIKTLKDYNNPQQWTEFQQEASLMAELHHPNIVCLLGAVTQEQPVCMLFEYINQGDLHEFLIMRSPHSDVGCSSDEDGTVKSSLDHGDFLHIAIQIAAGMEYLSSHFFVHKDLAARNILIGEQLHVKISDLGLSREIYSADYYRVQSKSLLPIRWMPPEAIMYGKFSSDSDIWSFGVVLWEIFSFGLQPYYGFSNQEVIEMVRKRQLLPCSEDCPPRMYSLMTECWNEIPSRRPRFKDIHVRLRSWEGLSSHTSSTTPSGGNATTQTTSLSASPVSNLSNPRYPNYMFPSQGITPQGQIAGFIGPPIPQNQRFIPINGYPIPPGYAAFPAAHYQPTGPPRVIQHCPPPKSRSPSSASGSTSTGHVTSLPSSGSNQEANIPLLPHMSIPNHPGGMGITVFGNKSQKPYKIDSKQASLLGDANIHGHTESMISAEL

SEQ ID NO: 629 - protein, 943 aa, Homo sapiens [sequence omitted]

SEQ ID NO: 630 - protein, 943 aa, Homo sapiens [sequence omitted]

SEQ ID NO: 631 - protein, 2355 aa, Homo sapiens
MKNIYCLIPKLVNFATLGCLWISVVQCTVLNSCLKSCVTNLGQQLDLGTPHNLSEPCIQGCHFWNSVDQKNCALKNDTYATVCERESCEVGCSSAEGAYEEEVLENADLPTAPFASSIGSHNMTLRWKSANFSGVKYIIQWKYAQLLGSWTYTKTVSRPSYVVKPLHPFTEYIFRVVWIFTAQLQLYSPPSPSYRTHPHGVPETAPLIRNIESSSPDTVEVSWDPPQFPGGPILGYNLRLISKNQKLDAGTQRTSFQFYSTLPNTIYRFSIAAVNEVGEGPEAESSITTSSSAVQQEEQWLFLSRKTSLRKRSLKHLVDEAHCLRLDAIYHNITGISVDVHQQIVYFSEGTLIWAKKAANMSDVSDLRIFYRGSGLISSISIDWLYQRMYFIMDELVCVCDLENCSNIEEITPPSISAPQKIVADSYNGYVFYLLRDGIYRADLPVPSGRCAEAVRIVESCTLKDFAIKPQAKRIIYFNDTAQVFMSTFLDGSASHLILPRIPFADVKSFACENNDFLVTDGKVIFQQDALSFNEFIVGCDLSHIEEFGFGNLVIFGSSSQLHPLPGRPQELSVLFGSHQALVQWKPPALAIGANVILISDIIELFELGPSAWQNWTYEVKVSTQDPPEVTHIFLNISGTMLNVPELQSAMKYKVSVRASSPKRPGPWSEPSVGTTLVPASEPPFIMAVKEDGLWSKPLNSFGPGEFLSSDIGNVSDMDWYNNSLYYSDTKGDVFVWLLNGTDISENYHLPSIAGAGALAFEWLGHFLYWAGKTYVIQRQSVLTGHTDIVTHVKLLVNDMVVDSVGGYLYWTTLYSVESTRLNGESSLVLQTQPWFSGKKVIALTLDLSDGLLYWLVQDSQCIHLYTAVLRGQSTGDTTITEFAAWSTSEISQNALMYYSGRLFWINGFRIITTQEIGQKTSVSVLEPARFNQFTIIQTSLKPLPGNFSFTPKVIPDSVQESSFRIEGNASSFQILWNGPPAVDWGVVFYSVEFSAHSKFLASEQHSLPVFTVEGLEPYALFNLSVTPYTYWGKGPKTSLSLRAPETVPSAPENPRIFILPSGKCCNKNEVVVEFRWNKPKHENGVLTKFEIFYNISNQSITNKTCEDWIAVNVTPSVMSFQLEGMSPRCFIAFQVRAFTSKGPGPYADVVKSTTSEINPFPHLITLLGNKIVFLDMDQNQVVWTFSAERVISAVCYTADNEMGYYAEGDSLFLLHLHNRSSSELFQDSLVFDITVITIDWISRHLYFALKESQNGMQVFDVDLEHKVKYPREVKIHNRNSTIISFSVYPLLSRLYWTEVSNFGYQMFYYSIISHTLHRILQPTATNQQNKRNQCSCNVTEFELSGAMAIDTSNLEKPLIYFAKAQEIWAMDLEGCQCWRVITVPAMLAGKTLVSLTVDGDLIYWIITAKDSTQIYQAKKGNGAIVSQVKALRSRHILAYSSVMQPFPDKAFLSLASDTVEPTILNATNTSLTIRLPLAKTNLTWYGITSPTPTYLVYYAEVNDRKNSSDLKYRILEFQDSIALIEDLQPFSTYMIQIAVKNYYSDPLEHLPPGKEIWGKTKNGVPEAVQLINTTVRSDTSLIISWRESHKPNGPKESVRYQLAISHLALIPETPLRQSEFPNGRLTLLVTRLSGGNIYVLKVLACHSEEMWCTESHPVTVEMFNTPEKPYSLVPENTSLQFNWKAPLNVNLIRFWVELQKWKYNEFYHVKTSCSQGPAYVCNITNLQPYTSYNVRVVVVYKTGENSTSLPESFKTKAGVPNKPGIPKLLEGSKNSIQWEKAEDNGCRITYYILEIRKSTSNNLQNQNLRWKMTFNGSCSSVCTWKSKNLKGIFQFRVVAANNLGFGEYSGISENIILVGDDFWIPETSFILTIIVGIFLVVTIPLTFVWHRRLKNQKSAKEGVTVLINEDKELAELRGLAAGVGLANACYAIHTLPTQEEIENLPAFPREKLTLRLLLGSGAFGEVYEGTAVDILGVGSGEIKVAVKTLKKGSTDQEKIEFLKEAHLMSKFNHPNILKQLGVCLLNEPQYIILELMEGGDLLTYLRKARMATFYGPLLTLVDLVDLCVDISKGCVYLERMHFIHRDLAARNCLVSVKDYTSPRIVKIGDFGLARDIYKNDYYRKRGEGLLPVRWMAPESLMDGIFTTQSDVWSFGILIWEILTLGHQPYPAHSNLDVLNYVQTGGRLEPPRNCPDDLWNLMTQCWAQEPDQRPTFHRIQDQLQLFRNFFLNSIYKSRDEANNSGVINESFEGEDGDVICLNSDDIMPVALMETKNREGLNYMVLATECGQGEEKSEGPLGSQESESCGLRKEEKEPHADKDFCQEKQVAYCPSGKPEGLNYACLTHSGYGDGSD

SEQ ID NO: 632 - protein, 2347 aa, Homo sapiens
MKNIYCLIPKLVNFATLGCLWISVVQCTVLNSCLKSCVTNLGQQLDLGTPHNLSEPCIQGCHFWNSVDQKNCALKCRESCEVGCSSAEGAYEEEVLENADLPTAPFASSIGSHNMTLRWKSANFSGVKYIIQWKYAQLLGSWTYPKTVSRPSYVVKPLHPFTEYIFRVVWIFTAQLQLYSPPSPSYRTHPHGVPETAPLIRNIESSSPDTVEVSWDPPQFPGGPILGYNLRLISKNQKLDAGTQRTSFQFYSTLPNTIYRFSIAAVNEVGEGPEAESSITTSSSAVQQEEQWLFLSRKTSLRKRSLKHLVDEAHCLRLDAIYHNITGISVDVHQQIVYFSEGTLIWAKKAANMSDVSDLRIFYRGSGLISSISIDWLYQRMYFIMDELVCVCDLENCSNIEEITPPSISAPQKIVADSYNGYVFYLLRDGIYRADLPVPSGRCAEAVRIVESCTLKDFAIKPQAKRIIYFNDTAQVFMSTFLDGSASHLILPRIPFADVKSFACENNDFLVTDGKVIFQQDALSFNEFIVGCDLSHIEEFGFGNLVIFGSSSQLHPLPGRPQELSVLFGSHQALVQWKPPALAIGANVILISDIIELFELGPSAWQNWTYEVKVSTQDPPEVTHIFLNISGTMLNVPELQSAMKYKVSVRASSPKRPGPWSEPSVGTTLVPASEPPFIMAVKEDGLWSKPLNSFGPGEFLSSDIGNVSDMDWYNNSLYYSDTKGDVFVWLLNGTDISENYHLPSIAGAGALAFEWLGHFLYWAGKTYVIQRQSVLTGHTDIVTHVKLLVNDMVVDSVGGYLYWTTLYSVESTRLNGESSLVLQTQPWFSGKKVIALTLDLSDGLLYWLVQDSQCIHLYTAVLRGQSTGDTTITEFAAWSTSEISQNALMYYSGRLFWINGFRIITTQEIGQKTSVSVLEPARFNQFTIIQTSLKPLPGNFSFTPKVIPDSVQESSFRIEGNASSFQILWNGPPAVDWGVVFYSVEFSAHSKFLASEQHSLPVFTVEGLEPYALFNLSVTPYTYWGKGPKTSLSLRAPETVPSAPENPRIFILPSGKCCNKNEVVVEFRWNKPKHENGVLTKFEIFYNISNQSITNKTCEDWIAVNVTPSVMSFQLEGMSPRCFIAFQVRAFTSKGPGPYADVVKSTTSEINPFPHLITLLGNKIVFLDMDQNQVVWTFSAERVISAVCYTADNEMGYYAEGDSLFLLHLHNRSSSELFQDSLVFDITVITIDWISRHLYFALKESQNGMQVFDVDLEHKVKYPREVKIHNRNSTIISFSVYPLLSRLYWTEVSNFGYQMFYYSIISHTLHRILQPTATNQQNKRNQCSCNVTEFELSGAMAIDTSNLEKPLIYFAKAQEIWAMDLEGCQCWRVITVPAMLAGKTLVSLTVDGDLIYWIITAKDSTQIYQAKKGNGAIVSQVKALRSRHILAYSSVMQPFPDKAFLSLASDTVEPTILNATNTSLTIRLPLAKTNLTWYGITSPTPTYLVYYAEVNDRKNSSDLKYRILEFQDSIALIEDLQPFSTYMIQIAVKNYYSDPLEHLPPGKEIWGKTKNGVPEAVQLINTTVRSDTSLIISWRESHKPNGPKESVRYQLAISHLALIPETPLRQSEFPNGRLTLLVTRLSGGNIYVLKVLACHSEEMWCTESHPVTVEMFNTPEKPYSLVPENTSLQFNWKAPLNVNLIRFWVELQKWKYNEFYHVKTSCSQGPAYVCNITNLQPYTSYNVRVVVVYKTGENSTSLPESFKTKAGVPNKPGIPKLLEGSKNSIQWEKAEDNGCRITYYILEIRKSTSNNLQNQNLRWKMTFNGSCSSVCTWKSKNLKGIFQFRVVAANNLGFGEYSGISENIILVGDDFWIPETSFILTIIVGIFLVVTIPLTFVWHRRLKNQKSAKEGVTVLINEDKELAELRGLAAGVGLANACYAIHTLPTQEEIENLPAFPREKLTLRLLLGSGAFGEVYEGTAVDILGVGSGEIKVAVKTLKKGSTDQEKIEFLKEAHLMSKFNHPNILKQLGVCLLNEPQYIILELMEGGDLLTYLRKARMATFYGPLLTLVDLVDLCVDISKGCVYLERMHFIHRDLAARNCLVSVKDYTSPRIVKIGDFGLARDIYKNDYYRKRGEGLLPVRWMAPESLMDGIFTTQSDVWSFGILIWEILTLGHQPYPAHSNLDVLNYVQTGGRLEPPRNCPDDLWNLMTQCWAQEPDQRPTFHRIQDQLQLFRNFFLNSIYKSRDEANNSGVINESFEGEDGDVICLNSDDIMPVALMETKNREGLNYMVLATECGQGEEKSEGPLGSQESESCGLRKEEKEPHADKDFCQEKQVAYCPSGKPEGLNYACLTHSGYGDGSD

SEQ ID NO: 633 - protein, 2347 aa, Homo sapiens
MKNIYCLIPKLVNFATLGCLWISVVQCTVLNSCLKSCVTNLGQQLDLGTPHNLSEPCIQGCHFWNSVDQKNCALKCRESCEVGCSSAEGAYEEEVLENADLPTAPFASSIGSHNMTLRWKSANFSGVKYIIQWKYAQLLGSWTYTKTVSRPSYVVKPLHPFTEYIFQVVWIFTAQLQLYSPPSPSYRTHPHGVPETAPLIRNIESSSPDTVEVSWDPPQFPGGPILGYNLRLISKNQKLDAGTQRTSFQFYSTLPNTIYRFSIAAVNEVGEGPEAESSITTSSSAVQQEEQWLFLSRKTSLRKRSLKHLVDEAHCLRLDAIYHNITGISVDVHQQIVYFSEGTLIWAKKAANMSDVSDLRIFYRGSGLISSISIDWLYQRMYFIMDELVCVCDLENCSNIEEITPPSISAPQKIVADSYNGYVFYLLRDGIYRADLPVPSGRCAEAVRIVESCTLKDFAIKPQAKRIIYFNDTAQVFMSTFLDGSASHLILPRIPFADVKSFACENNDFLVTDGKVIFQQDALSFNEFIVGCDLSHIEEFGFGNLVIFGSSSQLHPLPGRPQELSVLFGSHQALVQWKPPALAIGANVILISDIIELFELGPSAWQNWTYEVKVSTQDPPEVTHIFLNISGTMLNVPELQSAMKYKVSVRASSPKRPGPWSEPSVGTTLVPASEPPFIMAVKEDGLWSKPLNSFGPGEFLSSDIGNVSDMDWYNNSLYYSDTKGDVFVWLLNGTDISENYHLPSIAGAGALAFEWLGHFLYWAGKTYVIQRQSVLTGHTDIVTHVKLLVNDMVVDSVGGYLYWTTLYSVESTRLNGESSLVLQTQPWFSGKKVIALTLDLSDGLLYWLVQDSQCIHLYTAVLRGQSTGDTTITEFAAWSTSEISQNALMYYSGRLFWINGFRIITTQEIGQKTSVSVLEPARFNQFTIIQTSLKPLPGNFSFTPKVIPDSVQESSFRIEGNASSFQILWNGPPAVDWGVVFYSVEFSAHSKFLASEQHSLPVFTVEGLEPYALFNLSVTPYTYWGKGPKTSLSLRAPETVPSAPENPRIFILPSGKCCNKNEVVVEFRWNKPKHENGVLTKFEIFYNISNQSITNKTCEDWIAVNVTPSVMSFQLEGMSPRCFIAFQVRAFTSKGPGPYADVVKSTTSEINPFPHLITLLGNKIVFLDMDQNQVVWTFSAERVISAVCYTADNEMGYYAEGDSLFLLHLHNRSSSELFQDSLVFDITVITIDWISRHLYFALKESQNGMQVFDVDLEHKVKYPREVKIHNRNSTIISFSVYPLLSRLYWTEVSNFGYQMFYYSIISHTLHRILQPTATNQQNKRNQCSCNVTEFELSGAMAIDTSNLEKPLIYFAKAQEIWAMDLEGCQCWRVITVPAMLAGKTLVSLTVDGDLIYWIITAKDSTQIYQAKKGNGAIVSQVKALRSRHILAYSSVMQPFPDKAFLSLASDTVEPTILNATNTSLTIRLPLAKTNLTWYGITSPTPTYLVYYAEVNDRKNSSDLKYRILEFQDSIALIEDLQPFSTYMIQIAVKNYYSDPLEHLPPGKEIWGKTKNGVPEAVQLINTTVRSDTSLIISWRESHKPNGPKESVRYQLAISHLALIPETPLRQSEFPNGRLTLLVTRLSGGNIYVLKVLACHSEEMWCTESHPVTVEMFNTPEKPYSLVPENTSLQFNWKAPLNVNLIRFWVELQKWKYNEFYHVKTSCSQGPAYVCNITNLQPYTSYNVRVVVVYKTGENSTSLPESFKTKAGVPNKPGIPKLLEGSKNSIQWEKAEDNGCRITYYILEIRKSTSNNLQNQNLRWKMTFNGSCSSVCTWKSKNLKGIFQFRVVAANNLGFGEYSGISENIILVGDDFWIPETSFILTIIVGIFLVVTIPLTFVWHRRLKNQKSAKEGVTVLINEDKELAELRGLAAGVGLANACYAIHTLPTQEEIENLPAFPREKLTLRLLLGSGAFGEVYEGTAVDILGVGSGEIKVAVKTLKKGSTDQEKIEFLKEAHLMSKFNHPNILKQLGVCLLNEPQYIILELMEGGDLLTYLRKARMATFYGPLLTLVDLVDLCVDISKGCVYLERMHFIHRDLAARNCLVSVKDYTSPRIVKIGDFGLARDIYKNDYYRKRGEGLLPVRWMAPESLMDGIFTTQSDVWSFGILIWEILTLGHQPYPAHSNLDVLNYVQTGGRLEPPRNCPDDLWNLMTQCWAQEPDQRPTFHRIQDQLQLFRNFFLNSIYKSRDEANNSGVINESFEGEDGDVICLNSDDIMPVALMETKNREGLNYMVLATECGQGEEKSEGPLGSQESESCGLRKEEKEPHADKDFCQEKQVAYCPSGKPEGLNYACLTHSGYGDGSD

SEQ ID NO: 634 - protein, 2347 aa, Homo sapiens
MKNIYCLIPKLVNFATLGCLWISVVQCTVLNSCLKSCVTNLGQQLDLGTPHNLSEPCIQGCHFWNSVDQKNCALKCRESCEVGCSSAEGAYEEEVLENADLPTAPFASSIGSHNMTLRWKSANFSGVKYIIQWKYAQLLGSWTYTKTVSRPSYVVKPLHPFTEYIFRVVWIFTAQLQLYSPPSPSYRTHPHGVPETAPLIRNIESSSPDTVEVSWDPPQFPGGPILGYNLRLISKNQKLDAGTQRTSFQFYSTLPNTIYRFSIAAVNEVGEGPEAESSITTSSSAVQQEEQWLFLSRKTSLRKRSLKHLVDEAHCLRLDAIYHNITGISVDVHQQIVYFSEGTLIWAKKAANMSDVSDLRIFYRGSGLISSISIDWLYQRMYFIMDELVCVCDLENCSNIEEITPPSISAPQKIVADSYNGYVFYLLRDGIYRADLPVPSGRCAEAVRIVESCTLKDFAIKPQAKRIIYFNDTAQVFMSTFLDGSASHLILPRIPFADVKSFACENNDFLVTDGKVIFQQDALSFNEFIVGCDLSHMEEFGFGNLVIFGSSSQLHPLPGRPQELSVLFGSHQALVQWKPPALAIGANVILISDIIELFELGPSAWQNWTYEVKVSTQDPPEVTHIFLNISGTMLNVPELQSAMKYKVSVRASSPKRPGPWSEPSVGTTLVPASEPPFIMAVKEDGLWSKPLNSFGPGEFLSSDIGNVSDMDWYNNSLYYSDTKGDVFVWLLNGTDISENYHLPSIAGAGALAFEWLGHFLYWAGKTYVIQRQSVLTGHTDIVTHVKLLVNDMVVDSVGGYLYWTTLYSVESTRLNGESSLVLQTQPWFSGKKVIALTLDLSDGLLYWLVQDSQCIHLYTAVLRGQSTGDTTITEFAAWSTSEISQNALMYYSGRLFWINGFRIITTQEIGQKTSVSVLEPARFNQFTIIQTSLKPLPGNFSFTPKVIPDSVQESSFRIEGNASSFQILWNGPPAVDWGVVFYSVEFSAHSKFLASEQHSLPVFTVEGLEPYALFNLSVTPYTYWGKGPKTSLSLRAPETVPSAPENPRIFILPSGKCCNKNEVVVEFRWNKPKHENGVLTKFEIFYNISNQSITNKTCEDWIAVNVTPSVMSFQLEGMSPRCFIAFQVRAFTSKGPGPYADVVKSTTSEINPFPHLITLLGNKIVFLDMDQNQVVWTFSAERVISAVCYTADNEMGYYAEGDSLFLLHLHNRSSSELFQDSLVFDITVITIDWISRHLYFALKESQNGMQVFDVDLEHKVKYPREVKIHNRNSTIISFSVYPLLSRLYWTEVSNFGYQMFYYSIISHTLHRILQPTATNQQNKRNQCSCNVTEFELSGAMAIDTSNLEKPLIYFAKAQEIWAMDLEGCQCWRVITVPAMLAGKTLVSLTVDGDLIYWIITAKDSTQIYQAKKGNGAIVSQVKALRSRHILAYSSVMQPFPDKAFLSLASDTVEPTILNATNTSLTIRLPLAKTNLTWYGITSPTPTYLVYYAEVNDRKNSSDLKYRILEFQDSIALIEDLQPFSTYMIQIAVKNYYSDPLEHLPPGKEIWGKTKNGVPEAVQLINTTVRSDTSLIISWRESHKPNGPKESVRYQLAISHLALIPETPLRQSEFPNGRLTLLVTRLSGGNIYVLKVLACHSEEMWCTESHPVTVEMFNTPEKPYSLVPENTSLQFNWKAPLNVNLIRFWVELQKWKYNEFYHVKTSCSQGPAYVCNITNLQPYTSYNVRVVVVYKTGENSTSLPESFKTKAGVPNKPGIPKLLEGSKNSIQWEKAEDNGCRITYYILEIRKSTSNNLQNQNLRWKMTFNGSCSSVCTWKSKNLKGIFQFRVVAANNLGFGEYSGISENIILVGDDFWIPETSFILTIIVGIFLVVTIPLTFVWHRRLKNQKSAKEGVTVLINEDKELAELRGLAAGVGLANACYAIHTLPTQEEIENLPAFPREKLTLRLLLGSGAFGEVYEGTAVDILGVGSGEIKVAVKTLKKGSTDQEKIEFLKEAHLMSKFNHPNILKQLGVCLLNEPQYIILELMEGGDLLTYLRKARMATFYGPLLTLVDLVDLCVDISKGCVYLERMHFIHRDLAARNCLVSVKDYTSPRIVKIGDFGLARDIYKNDYYRKRGEGLLPVRWMAPESLMDGIFTTQSDVWSFGILIWEILTLGHQPYPAHSNLDVLNYVQTGGRLEPPRNCPDDLWNLMTQCWAQEPDQRPTFHRIQDQLQLFRNFFLNSIYKSRDEANNSGVINESFEGEDGDVICLNSDDIMPVALMETKNREGLNYMVLATECGQGEEKSEGPLGSQESESCGLRKEEKEPHADKDFCQEKQVAYCPSGKPEGLNYACLTHSGYGDGSD

SEQ ID NO: 635 - protein, 2347 aa, Homo sapiens
MKNIYCLIPKLVNFATLGCLWISVVQCTVLNSCLKSCVTNLGQQLDLGTPHNLSEPCIQGCHFWNSVDQKNCALKCRESCEVGCSSAEGAYEEEVLENADLPTAPFASSIGSHNMTLRWKSANFSGVKYIIQWKYAQLLGSWTYTKTVSRPSYVVKPLHPFTEYIFRVVWIFTAQLQLYSPPSPSYRTHPHGVPETAPLIRNIESSSPDTVEVSWDPPQFPGGPILGYNLRLISKNQKLDAGTQRTSFQFYSTLPNTIYRFSIAAVNEVGEGPEAESSITTSSSAVQQEEQWLFLSRKTSLRKRSLKHLVDEAHCLRLDAIYHNITGISVDVHQQIVYFSEGTLIWAKKAANMSDVSDLRIFYRGSGLISSISIDWLYQRMYFIMDELVCVCDLENCSNIEEITPPSISAPQKIVADSYNGYVFYLLRDGIYRADLPVPSGRCAEAVRIVESCTLKDFAIKPQAKRIIYFNDTAQVFMSTFLDGSASHLILPRIPFADVKSFACENNDFLVTDGKVIFQQDALSFNEFIVGCDLSHIEEFGFGNLVIFGSSSQLHPLPGRPQELSVLFGSHQALVQWKPPALAIGANVILISDIIELFELGPSAWQNWTYEVKVSTQDPPEVTHIFLNISGTMLNVPELQSAMKYKVSVRASSPKRPGPWSEPSVGTTLVPASEPPFIMAVKEDGLWSKPLNSFGPGEFLSSDIGNVSDMDWYNNSLYYSDTKGDVFVWLLNGTDISENYHLPSIAGAGALAFEWLGHFLYWAGKTYVIQRQSVLTGHTDIVTHVKLLVNDMVVDSVGGYLYWTTLYSVESTRLNGESSLVLQTQPWFSGKKVIALTLDLSDGLLYWLVQDSQCIHLYTAVLRGQSTGDTTITEFAAWSTSEISQNALMYYSGRLFWINGFRIITTQEIGQKTSVSVLEPARFNQFTIIQTSLKPLPGNFSFTPKVIPDSVQESSFRIEGNASSFQILWNGPPAVDWGVVFYSVEFSAHSKFLASEQHSLPVFTVEGLEPYALFNLSVTPYTYWGKGPKTSLSLRAPETVPSAPENPRIFILPSGKCCNKNEVVVEFRWNKPKHENGVLTKFEIFYNISNQSITNKTCEDWIAVNVTPLVMSFQLEGMSPRCFIAFQVRAFTSKGPGPYADVVKSTTSEINPFPHLITLLGNKIVFLDMDQNQVVWTFSAERVISAVCYTADNEMGYYAEGDSLFLLHLHNRSSSELFQDSLVFDITVITIDWISRHLYFALKESQNGMQVFDVDLEHKVKYPREVKIHNRNSTIISFSVYPLLSRLYWTEVSNFGYQMFYYSIISHTLHRILQPTATNQQNKRNQCSCNVTEFELSGAMAIDTSNLEKPLIYFAKAQEIWAMDLEGCQCWRVITVPAMLAGKTLVSLTVDGDLIYWIITAKDSTQIYQAKKGNGAIVSQVKALRSRHILAYSSVMQPFPDKAFLSLASDTVEPTILNATNTSLTIRLPLAKTNLTWYGITSPTPTYLVYYAEVNDRKNSSDLKYRILEFQDSIALIEDLQPFSTYMIQIAVKNYYSDPLEHLPPGKEIWGKTKNGVPEAVQLINTTVRSDTSLIISWRESHKPNGPKESVRYQLAISHLALIPETPLRQSEFPNGRLTLLVTRLSGGNIYVLKVLACHSEEMWCTESHPVTVEMFNTPEKPYSLVPENTSLQFNWKAPLNVNLIRFWVELQKWKYNEFYHVKTSCSQGPAYVCNITNLQPYTSYNVRVVVVYKTGENSTSLPESFKTKAGVPNKPGIPKLLEGSKNSIQWEKAEDNGCRITYYILEIRKSTSNNLQNQNLRWKMTFNGSCSSVCTWKSKNLKGIFQFRVVAANNLGFGEYSGISENIILVGDDFWIPETSFILTIIVGIFLVVTIPLTFVWHRRLKNQKSAKEGVTVLINEDKELAELRGLAAGVGLANACYAIHTLPTQEEIENLPAFPREKLTLRLLLGSGAFGEVYEGTAVDILGVGSGEIKVAVKTLKKGSTDQEKIEFLKEAHLMSKFNHPNILKQLGVCLLNEPQYIILELMEGGDLLTYLRKARMATFYGPLLTLVDLVDLCVDISKGCVYLERMHFIHRDLAARNCLVSVKDYTSPRIVKIGDFGLARDIYKNDYYRKRGEGLLPVRWMAPESLMDGIFTTQSDVWSFGILIWEILTLGHQPYPAHSNLDVLNYVQTGGRLEPPRNCPDDLWNLMTQCWAQEPDQRPTFHRIQDQLQLFRNFFLNSIYKSRDEANNSGVINESFEGEDGDVICLNSDDIMPVALMETKNREGLNYMVLATECGQGEEKSEGPLGSQESESCGLRKEEKEPHADKDFCQEKQVAYCPSGKPEGLNYACLTHSGYGDGSD

SEQ ID NO: 636 - protein, 2347 aa, Homo sapiens
MKNIYCLIPKLVNFATLGCLWISVVQCTVLNSCLKSCVTNLGQQLDLGTPHNLSEPCIQGCHFWNSVDQKNCALKCRESCEVGCSSAEGAYEEEVLENADLPTAPFASSIGSHNMTLRWKSANFSGVKYIIQWKYAQLLGSWTYTKTVSRPSYVVKPLHPFTEYIFRVVWIFTAQLQLYSPPSPSYRTHPHGVPETAPLIRNIESSSPDTVEVSWDPPQFPGGPILGYNLRLISKNQKLDAGTQRTSFQFYSTLPNTIYRFSIAAVNEVGEGPEAESSITTSSSAVQQEEQWLFLSRKTSLRKRSLKHLVDEAHCLRLDAIYHNITGISVDVHQQIVYFSEGTLIWAKKAANMSDVSDLRIFYRGSGLISSISIDWLYQRMYFIMDELVCVCDLENCSNIEEITPPSISAPQKIVADSYNGYVFYLLRDGIYRADLPVPSGRCAEAVRIVESCTLKDFAIKPQAKRIIYFNDTAQVFMSTFLDGSASHLILPRIPFADVKSFACENNDFLVTDGKVIFQQDALSFNEFIVGCDLSHIEEFGFGNLVIFGSSSQLHPLPGRPQELSVLFGSHQALVQWKPPALAIGANVILISDIIELFELGPSAWQNWTYEVKVSTQDPPEVTHIFLNISGTMLNVPELQSAMKYKVSVRASSPKRPGPWSEPSVGTTLVPASEPPFIMAVKEDGLWSKPLNSFGPGEFLSSDIGNVSDMDWYNNSLYYSDTKGDVFVWLLNGTDISENYHLPSIAGAGALAFEWLGHFLYWAGKTYVIQRQSVLTGHTDIVTHVKLLVNDMVVDSVGGYLYWTTLYSVESTRLNGESSLVLQTQPWFSGKKVIALTLDLSDGLLYWLVQDSQCIHLYTAVLRGQSTGDTTITEFAAWSTSEISQNALMYYSGRLFWINGFRIITTQEIGQKTSVSVLEPARFNQFTIIQTSLKPLPGNFSFTPKVIPDSVQESSFRIEGNASSFQILWNGPPAVDWGVVFYSVEFSAHSKFLASEQHSLPVFTVEGLEPYALFNLSVTPYTYWGKGPKTSLSLRAPETVPSAPENPRIFILPSGKCCNKNEVVVEFRWNKPKHENGVLTKFEIFYNISNQSITNKTCEDWIAVNVTPSVMSFQLEGMSPRCFIAFQVRAFTSKGPGPYADVVKSTTSEINPFPHLITLLGNKIVFLDMDQNQVVWTFSAERVISAVCYTADNEMGYYAEGDSLFLLHLHNRSSSELFQDSLVFDITVITIDWISRHLYFALKESQNGMQVFDVDLEHKVKYPREVKIHNRNSTIISFSVYPLLSRLYWTEVSNFGYQMFYYSIISHTLHRILQPTATNQQNKRNQCSCNVTEFELSGAMAIDTSNLEKPLIYFAKAQEIWAMDLEGCQCWRVITVPAMLAGKTLVSLTVDGDLIYWIITAKDSTQIYQAKKGNGAIVSQVKALRSRHILAYSSVMQPFPDKAFLSLASDTVEPTILNATNTSLTIRLPLAKTNLTWYGITSPTPTYLVYYAEVNDRKNSSDLKYRILEFQDSIALIEDLQPFSTYMIQIAVKNYYSDPLEHLPPGKEIWGKTKNGVPEAVQLINTTVRSDTSLIISWRESHKPNGPKESVRYQLAISHLALIPETPLRQSEFPNGRLTLLVTRLSGGNIYVLKVLACHSEEMWCTESHPVTVEMFNTPEKPYSLVPENTSLQFNWKAPLNVNLIRFWVELQKWKYNEFYHVKTSCSQGPAYVCNITNLQPYTSYNVRVVVVYKTGENSTSLPESFKTKAGVPNKPGIPKLLEGSKNSIQWEKAEDNGCRITYYILEIRKSTSNNLQNQNLRWKMTFNGSCSSVCTWKSKNLKGIFQFRVVAANNLGFGEYSGISENIILVGDDFWIPETSFILTIIVGIFLVVTIPLTFVWHRRLKNQKSAKEGVTVLINEDKELAELRGLAAGVGLANACYAIHTLPTQEEIENLPAFPREKLTLRLLLGSGAFGEVYEGTAVDILGVGSGEIKVAVKTLKKGSTDQEKIEFLKEAHLMSKFNHPNILKQLGVCLLNEPQYIILELMEGGDLLTYLRKARMATFYGPLLTLVDLVDLCVDISKGCVYLERMHFIHRDLAARNCLVSVKDYTSPRIVKIGDFGLARDIYKNDYYRKRGEGLLPVRWMAPESLMDGIFTTQSDVWSFGILIWEILTLGHQPYPAHSNLDVLNYVQTGGRLEPPRNCPDDLWNLMTQCWAQEPDQRPTFHRIQNQLQLFRNFFLNSIYKSRDEANNSGVINESFEGEDGDVICLNSDDIMPVALMETKNREGLNYMVLATECGQGEEKSEGPLGSQESESCGLRKEEKEPHADKDFCQEKQVAYCPSGKPEGLNYACLTHSGYGDGSD

SEQ ID NO: 637 - protein, 2347 aa, Homo sapiens
MKNIYCLIPKLVNFATLGCLWISVVQCTVLNSCLKSCVTNLGQQLDLGTPHNLSEPCIQGCHFWNSVDQKNCALKCRESCEVGCSSAEGAYEEEVLENADLPTAPFASSIGSHNMTLRWKSANFSGVKYIIQWKYAQLLGSWTYTKTVSRPSYVVKPLHPFTEYIFRVVWIFTAQLQLYSPPSPSYRTHPHGVPETAPLIRNIESSSPDTVEVSWDPPQFPGGPILGYNLRLISKNQKLDAGTQRTSFQFYSTLPNTIYRFSIAAVNEVGEGPEAESSITTSSSAVQQEEQWLFLSRKTSLRKRSLKHLVDEAHCLRLDAIYHNITGISVDVHQQIVYFSEGTLIWAKKAANMSDVSDLRIFYRGSGLISSISIDWLYQRMYFIMDELVCVCDLENCSNIEEITPPSISAPQKIVADSYNGYVFYLLRDGIYRADLPVPSGRCAEAVRIVESCTLKDFAIKPQAKRIIYFNDTAQVFMSTFLDGSASHLILPRIPFADVKSFACENNDFLVTDGKVIFQQDALSFNEFIVGCDLSHIEEFGFGNLVIFGSSSQLHPLPGRPQELSVLFGSHQALVQWKPPALAIGANVILISDIIELFELGPSAWQNWTYEVKVSTQDPPEVTHIFLNISGTMLNVPELQSAMKYKVSVRASSPKRPGPWSEPSVGTTLVPASEPPFIMAVKEDGLWSKPLNSFGPGEFLSSDIGNVSDMDWYNNSLYYSDTKGDVFVWLLNGTDISENYHLPSIAGAGALAFEWLGHFLYWAGKTYVIQRQSVLTGHTDIVTHVKLLVNDMVVDSVGGYLYWTTLYSVESTRLNGESSLVLQTQPWFSGKKVIALTLDLSDGLLYWLVQDSQCIHLYTAVLRGQSTGDTTITEFAAWSTSEISQNALMYYSGRLFWINGFRIITTQEIGQKTSVSVLEPARFNQFTIIQTSLKPLPGNFSFTPKVIPDSVQESSFRIEGNASSFQILWNGPPAVDWGVVFYSVEFSAHSKFLASEQHSLPVFTVEGLEPYALFNLSVTPYTYWGKGPKTSLSLRAPETVPSAPENPRIFILPSGKCCNKNEVVVEFRWNKPKHENGVLTKFEIFYNISNQSITNKTCEDWIAVNVTPSVMSFQLEGMSPRCFIAFQVRAFTSKGPGPYADVVKSTTSEINPFPHLITLLGNKIVFLDMDQNQVVWTFSAERVISAVCYTADNEMGYYAEGDSLFLLHLHNRSSSELFQDSLVFDITVITIDWISRHLYFALKESQNGMQVFDVDLEHKVKYPREVKIHNRNSTIISFSVYPLLSRLYWTEVSNFGYQMFYYSIISHTLHRILQPTATNQQNKRNQCSCNVTEFELSGAMAIDTSNLEKPLIYFAKAQEIWAMDLEGCQCWRVITVPAMLAGKTLVSLTVDGDLIYWIITAKDSTQIYQAKKGNGAIVSQVKALRSRHILAYSSVMQPFPDKAFLSLASDTVEPTILNATNTSLTIRLPLAKTNLTWYGITSPTPTYLVYYAEVNDRKNSSDLKYRILEFQDSIALIEDLQPFSTYMIQIAVKNYYSDPLEHLPPGKEIWGKTKNGVPEAVQLINTTVRSDTSLIISWRESHKPNGPKESVRYQLAISHLALIPETPLRQSEFPNGRLTLLVTRLSGGNIYVLKVLACHSEEMWCTESHPVTVEMFNTPEKPYSLVPENTSLQFNWKAPLNVNLIRFWVELQKWKYNEFYHVKTSCSQGPAYVCNITNLQPYTSYNVRVVVVYKTGENSTSLPESFKTKAGVPNKPGIPKLLEGSKNSIQWEKAEDNGCRITYYILEIRKSTSNNLQNQNLRWKMTFNGSCSSVCTWKSKNLKGIFQFRVVAANNLGFGEYSGISENIILVGDDFWIPETSFILTIIVGIFLVVTIPLTFVWHRRLKNQKSAKEGVTVLINEDKELAELRGLAAGVGLANACYAIHTLPTQEEIENLPAFPREKLTLRLLLGSGAFGEVYEGTAVDILGVGSGEIKVAVKTLKKGSTDQEKIEFLKEAHLMSKFNHPNILKQLGVCLLNEPQYIILELMEGGDLLTYLRKARMATFYGPLLTLVDLVDLCVDISKGCVYLERMHFIHRDLAARNCLVSVKDYTSPRIVKIGDFGLARDIYKNDYYRKRGEGLLPVRWMAPESLMDGIFTTQSDVWSFGILIWEILTLGHQPYPAHSNLDVLNYVQTGGRLEPPRNCPDDLWNLMTQCWAQEPDQRPTFHRIQDQLQLFRNFFLNSIYQSRDEANNSGVINESFEGEDGDVICLNSDDIMPVALMETKNREGLNYMVLATECGQGEEKSEGPLGSQESESCGLRKEEKEPHADKDFCQEKQVAYCPSGKPEGLNYACLTHSGYGDGSD

SEQ ID NO: 638 - protein, 2347 aa, Homo sapiens
MKNIYCLIPKLVNFATLGCLWISVVQCTVLNSCLKSCVTNLGQQLDLGTPHNLSEPCIQGCHFWNSVDQKNCALKCRESCEVGCSSAEGAYEEEVLENADLPTAPFASSIGSHNMTLRWKSANFSGVKYIIQWKYAQLLGSWTYTKTVSRPSYVVKPLHPFTEYIFRVVWIFTAQLQLYSPPSPSYRTHPHGVPETAPLIRNIESSSPDTVEVSWDPPQFPGGPILGYNLRLISKNQKLDAGTQRTSFQFYSTLPNTIYRFSIAAVNEVGEGPEAESSITTSSSAVQQEEQWLFLSRKTSLRKRSLKHLVDEAHCLRLDAIYHNITGISVDVHQQIVYFSEGTLIWAKKAANMSDVSDLRIFYRGSGLISSISIDWLYQRMYFIMDELVCVCDLENCSNIEEITPPSISAPQKIVADSYNGYVFYLLRDGIYRADLPVPSGRCAEAVRIVESCTLKDFAIKPQAKRIIYFNDTAQVFMSTFLDGSASHLILPRIPFADVKSFACENNDFLVTDGKVIFQQDALSFNEFIVGCDLSHIEEFGFGNLVIFGSSSQLHPLPGRPQELSVLFGSHQALVQWKPPALAIGANVILISDIIELFELGPSAWQNWTYEVKVSTQDPPEVTHIFLNISGTMLNVPELQSAMKYKVSVRASSPKRPGPWSEPSVGTTLVPASEPPFIMAVKEDGLWSKPLNSFGPGEFLSSDIGNVSDMDWYNNSLYYSDTKGDVFVWLLNGTDISENYHLPSIAGAGALAFEWLGHFLYWAGKTYVIQRQSVLTGHTDIVTHVKLLVNDMVVDSVGGYLYWTTLYSVESTRLNGESSLVLQTQPWFSGKKVIALTLDLSDGLLYWLVQDSQCIHLYTAVLRGQSTGDTTITEFAAWSTSEISQNALMYYSGRLFWINGFRIITTQEIGQKTSVSVLEPARFNQFTIIQTSLKPLPGNFSFTPKVIPDSVQESSFRIEGNASSFQILWNGPPAVDWGVVFYSVEFSAHSKFLASEQHSLPVFTVEGLEPYALFNLSVTPYTYWGKGPKTSLSLRAPETVPSAPENPRIFILPSGKCCNKNEVVVEFRWNKPKHENGVLTKFEIFYNISNQSITNKTCEDWIAVNVTPSVMSFQLEGMSPRCFIAFQVRAFTSKGPGPYADVVKSTTSEINPFPHLITLLGNKIVFLDMDQNQVVWTFSAERVISAVCYTADNEMGYYAEGDSLFLLHLHNRSSSELFQDSLVFDITVITIDWISRHLYFALKESQNGMQVFDVDLEHKVKYPREVKIHNRNSTIISFSVYPLLSRLYWTEVSNFGYQMFYYSIISHTLHRILQPTATNQQNKRNQCSCNVTEFELSGAMAIDTSNLEKPLIYFAKAQEIWAMDLEGCQCWRVITVPAMLAGKTLVSLTVDGDLIYWIITAKDSTQIYQAKKGNGAIVSQVKALRSRHILAYSSVMQPFPDKAFLSLASDTVEPTILNATNTSLTIRLPLAKTNLTWYGITSPTPTYLVYYAEVNDRKNSSDLKYRILEFQDSIALIEDLQPFSTYMIQIAVKNYYSDPLEHLPPGKEIWGKTKNGVPEAVQLINTTVRSDTSLIISWRESHKPNGPKESVRYQLAISHLALIPETPLRQSEFPNGRLTLLVTRLSGGNIYVLKVLACHSEEMWCTESHPVTVEMFNTPEKPYSLVPENTSLQFNWKAPLNVNLIRFWVELQKWKYNEFYHVKTSCSQGPAYVCNITNLQPYTSYNVRVVVVYKTGENSTSLPESFKTKAGVPNKPGIPKLLEGSKNSIQWEKAEDNGCRITYYILEIRKSTSNNLQNQNLRWKMTFNGSCSSVCTWKSKNLKGIFQFRVVAANNLGFGEYSGISENIILVGDDFWIPETSFILTIIVGIFLVVTIPLTFVWHRRLKNQKSAKEGVTVLINEDKELAELRGLAAGVGLANACYAIHTLPTQEEIENLPAFPREKLTLRLLLGSGAFGEVYEGTAVDILGVGSGEIKVAVKTLKKGSTDQEKIEFLKEAHLMSKFNHPNILKQLGVCLLNEPQYIILELMEGGDLLTYLRKARMATFYGPLLTLVDLVDLCVDISKGCVYLERMHFIHRDLAARNCLVSVKDYTSPRIVKIGDFGLARDIYKNDYYRKRGEGLLPVRWMAPESLMDGIFTTQSDVWSFGILIWEILTLGHQPYPAHSNLDVLNYVQTGGRLEPPRNCPDDLWNLMTQCWAQEPDQRPTFHRIQDQLQLFRNFFLNSIYKCRDEANNSGVINESFEGEDGDVICLNSDDIMPVALMETKNREGLNYMVLATECGQGEEKSEGPLGSQESESCGLRKEEKEPHADKDFCQEKQVAYCPSGKPEGLNYACLTHSGYGDGSD

SEQ ID NO: 639 - protein, 604 aa, Homo sapiens
MRGAARLGRPGRSCLPGPALRAAAAPALLLARCAVAAAAGLRAAARPRPPELQSASAGPSVSLYLSEDEVRRLIGLDAELYYVRNDLISHYALSFSLLVPSETNFLHFTWHAKSKVEYKLGFQVDNVLAMDMPQVNISVQGEVPRTLSVFRVELSCTGKVDSEVMILMQLNLTVNSSKNFTVLNFKRRKMCYKKLEEVKTSALDKNTSRTIYDPVHAAPTTSTRVFYISVGVCCAVIFLVAIILAVLHLHNMKRIELDDSISASSSSQGLSQPSTQTTQYLRADTPNNATPITSYPTLRIEKNDLRSVTLLEAKGKVKDIAISRERITLKDVLQEGTFGRIFHGILIDEKDPNKEKQAFVKTVKDQASEIQVTMMLTESCKLRGLHHRNLLPITHVCIEEGEKPMVILPYMNWGNLKLFLRQCKLVEANNPQAISQQDLVHMAIQIACGMSYLARREVIHKDLAARNCVIDDTLQVKITDNALSRDLFPMDYHCLGDNENRPVRWMALESLVNNEFSSASDVWAFGVTLWELMTLGQTPYVDIDPFEMAAYLKDGYRIAQPINCPDELFAVMACCWALDPEERPKFQQLVQCLTEFHAALGAYV

SEQ ID NO: 640 - protein, 604 aa, Homo sapiens
MRGAARLGRPGRSCLPGPALRAAAAPALLLARCAVAAAAGLRAAARPRPPELQSASAGPSVSLYLSEDEVRRLIGLDAELYYVRNDLISHYALSFNLLVPSETNFLHFTWHAKSKVEYKLGFQVDNVLAMDMPQVNISVQGEVPRTLSVFRVELSCTGKVDSEVMILMQLNLTVNSSKNFTVLNFKRRKMCYKKLEEVKTSALDKNTSRTIYDPVHAAPTTSTRVFYISVGVCCAVIFLVAIILAVLHLHNMKRIELDDSISASSSSQGLSQPSTQTTQYLRADTPNNATPITSYPTLRIEKNDLRSVTLLEAKGKVKDIAISRERITLKDVLQEGTFGRIFHGILIDEKDPNKEKQAFVKTVKDQASEIQVTMMLTESCKLRGLHHRNLLPITHVCIEEGEKPMVILPYMNWGNLKLFLRQCKLVEANNPQAISQQDLVHMAIQIACGMSYLARREVIHKDLAARNCVIDDTLQVKITDNALSRDLFPMDYHCLGDNENRPVRWMALESLVNNELSSASDVWAFGVTLWELMTLGQTPYVDIDPFEMAAYLKDGYRIAQPINCPDELFAVMACCWALDPEERPKFQQLVQCLTEFHAALGAYV

SEQ ID NO: 641 - protein, 422 aa, Homo sapiens
MGMTRMLLECSLSDKLCVIQEKQYEVIIVPTLLVTIFLILLGVILWLFIREQRTQQQRSGPQGIAPVPPPRDLSWEAGHGGNVALPLKETSVENFLGATTPALAKLQVPREQLSEVLEQICSGSCGPIFRANMNTGDPSKPKSVILKALKEPAGLHEVQDFLGRIQFHQYLGKHKNLVQLEGCCTEKLPLYMVLEDVAQGDLLSFLWTCRRDVMTMDGLLYDLTEKQVYHIGKQVLLALEFLQEKHLFHGDVAARNILMQSDLTAKLCGLGLAYEVYTRGAISSTQTIPLKWLAPERLLLRPASIRADVWSFGILLYEMVTLGAPPYPEVPPTSILEHLQRRKIMKRPSSCTHTMYSIMKSCWRWREADRPSPRELRLRLEAAIKTADDEAVLQVPELVVPELYAAVAGIRVESLFYNYSML

SEQ ID NO: 642 - protein, 1124 aa, Homo sapiens
MDSLASLVLCGVSLLLSGTVEGAMDLILINSLPLVSDAETSLTCIASGWRPHEPITIGRDFEALMNQHQDPLEVTQDVTREWAKKVVWKREKASKINGAYFCEGRVRGEAIRIRTMKMRQQASFLPATLTMTVDKGDNVNISFKKVLIKEEDAVIYKNGSFIHSVPRHEVPDILEVHLPHAQPQDAGVYSARYIGGNLFTSAFTRLIVRRCEAQKWGPECNHLCTACMNNGVCHEDTGECICPPGFMGRTCEKACELHTFGRTCKERCSGQEGCKSYVFCLPDPYGCSCATGWKGLQCNEACHPGFYGPDCKLRCSCNNGEMCDRFQGCLCSPGWQGLQCEREGIQRMTPKIVDLPDHIEVNSGKFNPICKASGWPLPTNEEMTLVKPDGTVLHPKDFNHTDHFSVAIFTIHRILPPDSGVWVCSVNTVAGMVEKPFNISVKVLPKPLNAPNVIDTGHNFAVINISSEPYFGDGPIKSKKLLYKPVNHYEAWQHIQVTNEIVTLNYLEPRTEYELCVQLVRRGEGGEGHPGPVRRFTTASIGLPPPRGLNLLPKSQTTLNLTWQPIFPSSEDDFYVEVERRSVQKSDQQNIKVPGNLTSVLLNNLHPREQYVVRARVNTKAQGEWSEDLTAWTLSDILPPQPENIKISNITHSSAVISWTILDGYSISSITIRYKVQGKNEDQHVDVKIKNATITQYQLKGLEPETAYQVDIFAENNIGSSNPAFSHELVTLPESQAPADLGGGKMLLIAILGSAGMTCLTVLLAFLIILQLKRANVQRRMAQAFQNVREEPAVQFNSGTLALNRKVKNNPDPTIYPVLDWNDIKFQDVIGEGNFGQVLKARIKKDGLRMDAAIKRMKEYASKDDHRDFAGELEVLCKLGHHPNIINLLGACEHRGYLYLAIEYAPHGNLLDFLRKSRVLETDPAFAIANSTASTLSSQQLLHFAADVARGMDYLSQKQFIHRDLAARNILVGENYVAKIADFGLSRGQEVYVKKTMGRLPVRWMAIESLNYSVYTTNSDVWSYGVLLWEIVSLGGTPYCGMTCAELYEKLPQGYRLEKPLNCDDEVYDLMRQCWREKPYERPSFAQILVSLNRMLEERKTYVNTTLYEKFTYAGIDCSAEEAA

SEQ ID NO: 643 - protein, 1124 aa, Homo sapiens [sequence omitted]

SEQ ID NO: 644 - protein, 1124 aa, Homo sapiens
MDSLASLVLCGVSLLLSGTVEGAMDLILINSLPLVSDAETSLTCIASGWRPHEPITIGRDFEALMNQHQDPLEVTQDVTREWAKKVVWKREKASKINGAYFCEGRVRGEAIRIRTMKMRQQASFLPATLTMTVDKGDNVNISFKKVLIKEEDAVIYKNGSFIHSVPRHEVPDILEVHLPHAQPQDAGVYSARYIGGNLFTSAFTRLIVRRCEAQKWGPECNHLCTACMNNGVCHEDTGECICPPGFMGRTCEKACELHTFGRTCKERCSGQEGCKSYVFCLPDPYGCSCATGWKGLQCNEACHPGFYGPDCKLRCSCNNGEMCDRFQGCLCSPGWQGLQCEREGIPRMTPKIVDLPDHIEVNSGKFNPICKASGWPLPTNEEMTLVKPDGTVLHPKDFNHTDHFSVAIFTIHRILPPDSGVWVCSVNTVAGMVEKPFNISVKVLPKPLNAPNVIDTGHNFAVINISSEPYFGDGPIKSKKLLYKPVNHYEAWQHIQVTNEIVTLNYLEPRTEYELCVQLVRRGEGGEGHPGPVRRFTTASIGLPPPRGLNLLPKSQTTLNLTWQPIFPSSEDDFYVEVERRSVQKSDQQNIKVPGNLTSLLLNNLHPREQYVVRARVNTKAQGEWSEDLTAWTLSDILPPQPENIKISNITHSSAVISWTILDGYSISSITIRYKVQGKNEDQHVDVKIKNATITQYQLKGLEPETAYQVDIFAENNIGSSNPAFSHELVTLPESQAPADLGGGKMLLIAILGSAGMTCLTVLLAFLIILQLKRANVQRRMAQAFQNVREEPAVQFNSGTLALNRKVKNNPDPTIYPVLDWNDIKFQDVIGEGNFGQVLKARIKKDGLRMDAAIKRMKEYASKDDHRDFAGELEVLCKLGHHPNIINLLGACEHRGYLYLAIEYAPHGNLLDFLRKSRVLETDPAFAIANSTASTLSSQQLLHFAADVARGMDYLSQKQFIHRDLAARNILVGENYVAKIADFGLSRGQEVYVKKTMGRLPVRWMAIESLNYSVYTTNSDVWSYGVLLWEIVSLGGTPYCGMTCAELYEKLPQGYRLEKPLNCDDEVYDLMRQCWREKPYERPSFAQILVSLNRMLEERKTYVNTTLYEKFTYAGIDCSAEEAA

SEQ ID NO: 645 - protein, 664 aa, Homo sapiens
MLPEAGSLWLLKLLRDIQLAQFYWPILEELNVTRPGHFDFVKPEDLDGIGMGRPAQRRLSEALKSLRSGPKSKNWVYKILGGFAPEHKEPTLPTDSPRHLPEPEGGLKCLIPEGAVCRGELLGSGCFGVVHRGLWTLPSGKSVPVAVKSLRVGPEGPMGTELGDFLREVSVMMNLEHPHVLRLHGLVLGQPLQMVMELAPLGSLHARLTAPAPTPPLLVALLCLFLRQLAGAMAYLGARGLVHRDLATRNLQLASPRTIKVADFGLVRPLGGARGRYVMGGPRPIPYTWCAPESLRHGAFSSASDVWMFGVTLWEMFSGGEEPWPGVPPYLILQRLEDRARLPRPPPSSRALYSLALRCWAPHPADRPSFSHLEGLLQEAGPSEACCVRDATEPGALRMETGDPITVIEGSSSFHSPDSTIWKDQNGRTFKVGSFPASAVTLTDAGGLPATRPVHRGTPARGDQHPGSIDGKKANLWDAPPARGQRRNMPLERMKGISRSLESVLSLGPRPTGGGSSPPEIRQARAVPQGPPGLPPRPPLSSSSPQPSQPSRERLPWPERKPPHNHPMGMPGARKAAALSGGLLSDPELQRKIMEMELSVHWVTHQECQTALGATGGDVASAIRNLKVDQLFLLSSRSRADCWRILEHYQWDLSAASRYVLARP

SEQ ID NO: 646 - protein, 666 aa, Homo sapiens
MLPEAGSLWLLKLLRDIQLAQFYWPILEELNVTRPGHFDFVKPEDLDGIGMGRPAQRRLSEALKSLRSGPKSKNWVYKILGGFAPEHKEPTLPTDSPRHLPEPEGGLKCLIPEGAVCRGELLGSGCFGVVHRGLWTLPSGKSVPVAVKSLRVGPEGPMGTELGDFLREVSVMMNLEHPHVLRLHGLVLGQPLQMVMELAPLGSLHARLTAPAPTPPLLVALLCLFLRQLAGAMAYLGARGLVHRDLATRNLQLASPRTIKVADFGLVRPLGGARGRYVMGGPRPIPYTWCAPESLRHGAFSSASDVWMFGVTLWEMFSGGEEPWPGVPPYLILQRLEDRARLPRPPPSSRALYSLALRCWAPHPADRPSFSHLEGLLQEAGPSEACCVRDATEPGALRMETGDPITVIEGSSSFHSPDSTIWKDQNGRTFKVGSFPASAVTLTDAGGLPATRPVHRGTPARGDQHPGSIDGDRKKANLWDAPPARGQRRNMPLERMKGISRSLESVLSLGPRPTGGGSSPPEIRQARAVPQGPPGLPPRPPLSSSSPQPSQPSRERLPWPERKPPHNHPMGMPGARKAAALSGGLLSDPELQRKIMEVELSVHWVTHQECQTALGATGGDVASAIRNLKVDQLFLLSSRSRADCWRILEHYQWDLSAASRYVLARP

SEQ ID NO: 647 - protein, 601 aa, Homo sapiens
MLPEAGSLWLLKLLRDIQLAQFYWPILEELNVTRPGHFDFVKPEDLDGIGMGRPAQRRLSEALKSLRSGPKSKNWVYKILGGFAPEHKEPTLPTDSPRHLPEPEGGLKCLIPEGAVCRGELLGSGCFGVVHRGLWTLPSGKSVPVAVKSLRVGPEGPMGTELGDFLREVSVMMNLEHPHVLRLHGLVLGQPLQMVMELAPLGSLHARLTAPAPTPPLLVALLCLFLRQLAGAMAYLGARGLVHRDLATRNLQLASPRTIKVADFGLVRPLGGARGRYVMGGPRPIPYTWCAPESLRHGAFSSASDVWMFGVTLWEMFSGGEEPWPGVPPYLILQRLEDRARLPRPPPSSRALYSLALRCWAPHPADRPSFSHLEGLLQEAGPSEACCVRDATEPGALRMETGDPITVIEGSSSFHSPDSTIWKDQNGRTFKVGSFPASAVTLTDAGGLPATRPVHRGTPARGDQHPGSIDGDRKKANLWDAPPARGQRRNMPLERMKGISRSLESVLSLGPRPTGGGSSPPEIRQARAVPQGPPGLPPRPPLSSSSPQPSQPSRERLPWPERKPPHNHPMGMPGARKAAALSGGLLSDPELQRKIMEVRSH

SEQ ID NO: 648 - protein, 527 aa, Homo sapiens
MILSSYNTIQSVFCCCCCCSVQKRQMRTQISLSTDEELPEKYTQHRRPWLSQLSNKKQSNTGCVQPSKRKPLPPLPPSEVAEEKIQVKALYDFLPREPCNLALRRAEEYLILEKYNPHWWKARDRLGNEGLIPSNYVTENKITNLEIYEWYHRNITRNQAEHLLRQESKEGAFIVRDSRHLGSYTISVFMGARRSTEAAIKHYQIKKNDSGQWYVAERHAFQSIPELIWYHQHNAAGLMTRLRYPVGLMGSCLPATAGFSYEKWEIDPSELAFIKEIGSGQFGVVHLGEWRSHIQVAIKAINEGSMSEEDFIEEAKVMMKLSHSKLVQLYGVCIQRKPLYIVTEFMENGCLLNYLRENKGKLRKEMLLSVCQDICEGMEYLERNGYIHRDLAARNCLVSSTCIVKISDFGMTRYVLDDEYVSSFGAKFPIKWSPPEVFLFNKYSSKSDVWSFGVLMWEVFTEGKMPFENKSNLQVVEAISEGFRLYRPHLAPMSIYEVMYSCWHEKPEGRPTFAELLRAVTEIAETW

SEQ ID NO: 649 - protein, 527 aa, Homo sapiens
MILSSYNTIQSVFCCCCCCSVQKRQMRTQISLSTDEELPEKYTQHRRPWLSQLSNKKQSNTGRVQPSKRKPLPPLPPSEVAEEKIQVKALYDFLPREPCNLALRRAEEYLILEKYNPHWWKARDRLGNEGLIPSNYVTENKITNLEIYEWYHRNITRNQAEHLLRQESKEGAFIVRDSRHLGSYTISVFMGARRSTEAAIKHYQIKKNDSGQWYVAERHAFQSIPELIWYHQHNAAGLMTRLRYPVGLMGSCLPATAGFSYEKWEIDPSELAFIKEIGSGQFGVVHLGEWRSHIQVAIKAINEGSMSEEDFIEEAKVMMKLSHSKLVQLYGVCIQQKPLYIVTEFMENGCLLNYLRENKGKLRKEMLLSVCQDICEGMEYLERNGYIHRDLAARNCLVSSTCIVKISDFGMTRYVLDDEYVSSFGAKFPIKWSPPEVFLFNKYSSKSDVWSFGVLMWEVFTEGKMPFENKSNLQVVEAISEGFRLYRPHLAPMSIYEVMYSCWHEKPEGRPTFAELLRAVTEIAETW

SEQ ID NO: 650 - protein, 427 aa, Homo sapiens
MILSSYNTIQSVFCCCCCCSVQKRQMRTQISLSTDEELPEKYTQHRRPWLSQLSNKKQSNTGRVQPSKRKPLPPLPPSEVAEEKIQVKALYDFLPREPCNLALRRAEEYLILEKYNPHWWKARDRLGNEGLIPSNYVTENKITNLEIYEWYHRNITRNQAEHLLRQESKEGAFIVRDSRHLGSYTISVFMGARRSTEAAIKHYQIKKNDSGQWYVAERHAFQSIPELIWYHQHNAAGLMTRLRYPVGLMGSCLPATAGFSYEKWEIDPSELAFIKEIGSGQFGVVHLGEWRSHIQVAIKAINEGSMSEEDFIEEAKVMMKLSHSKLVQLYGVCIQRKPLYIVTEFMENGCLLNYLRENKGKLRKEMLLSVCQDICEGMEYLERNGYIHRDLAARNCLVSSTCIVKISDFGMTRSFNVGSFYRRKNAF

SEQ ID NO: 651 - protein, 1187 aa, Homo sapiens
MPLRHWGMARGSKPVGDGAQPMAAMGGLKVLLHWAGPGGGEPWVTFSESSLTAEEVCIHIAHKVGITPPCFNLFALFDAQAQVWLPPNHILEIPRDASLMLYFRIRFYFRNWHGMNPREPAVYRCGPPGTEASSDQTAQGMQLLDPASFEYLFEQGKHEFVNDVASLWELSTEEEIHHFKNESLGMAFLHLCHLALRHGIPLEEVAKKTSFKDCIPRSFRRHIRQHSALTRLRLRNVFRRFLRDFQPGRLSQQMVMVKYLATLERLAPRFGTERVPVCHLRLLAQAEGEPCYIRDSGVAPTDPGPESAAGPPTHEVLVTGTGGIQWWPVEEEVNKEEGSSGSSGRNPQASLFGKKAKAHKAFGQPADRPREPLWAYFCDFRDITHVVLKEHCVSIHRQDNKCLELSLPSRAAALSFVSLVDGYFRLTADSSHYLCHEVAPPRLVMSIRDGIHGPLLEPFVQAKLRPEDGLYLIHWSTSHPYRLILTVAQRSQAPDGMQSLRLRKFPIEQQDGAFVLEGWGRSFPSVRELGAALQGCLLRAGDDCFSLRRCCLPQPGETSNLIIMRGARASPRTLNLSQLSFHRVDQKEITQLSHLGQGTRTNVYEGRLRVEGSGDPEEGKMDDEDPLVPGRDRGQELRVVLKVLDPSHHDIALAFYETASLMSQVSHTHLAFVHGVCVRGPENIMVTEYVEHGPLDVWLRRERGHVPMAWKMVVAQQLASALSYLENKNLVHGNVCGRNILLARLGLAEGTSPFIKLSDPGVGLGALSREERVERIPWLAPECLPGGANSLSTAMDKWGFGATLLEICFDGEAPLQSRSPSEKEHFYQRQHRLPEPSCPQLATLTSQCLTYEPTQRPSFRTILRDLTRLQPHNLADVLTVNPDSPASDPTVFHKRYLKKIRDLGEGHFGKVSLYCYDPTNDGTGEMVAVKALKADCGPQHRSGWKQEIDILRTLYHEHIIKYKGCCEDQGEKSLQLVMEYVPLGSLRDYLPRHSIGLAQLLLFAQQICEGMAYLHSQHYIHRDLAARNVLLDNDRLVKIGDFGLAKAVPEGHEYYRVREDGDSPVFWYAPECLKEYKFYYASDVWSFGVTLYELLTHCDSSQSPPTKFLELIGIAQGQMTVLRLTELLERGERLPRPDKCPCEVYHLMKNCWETEASFRPTFENLIPILKTVHEKYQGQAPSVFSVC

SEQ ID NO: 652 - protein, 1187 aa, Homo sapiens
MPLRHWGMARGSKPVGDGAQPMAAMGGLKVLLHWAGPGGGEPWVTFSESSLTAEEVCIHIAHKVGITPPCFNLFALFDAQAQVWLPPNHILEIPRDASLMLYFRIRFYFRNWHGMNPREPAVYRCGPPGTEASSDQTAQGMQLLDPASFEYLFEQGKHEFVNDVASLWELSTEEEIHHFKNESLGMAFLHLCHLALRHGIPLEEVAKKTSFKDCIPRSFRRHIRQHSALTRLRLRNVFRRFLRDFQPGRLSQQMVMVKYLATLERLAPRFGTERVPVCHLRLLAQAEGEPCYIRDSGVAPTDPGPESAAGPPTHEVLVTGTGGIQWWPVEEEVNKEEGSSGSSGRNPQASLFGKKAKAHKAVSQPADRPREPLWAYFCDFRDITHVVLKEHCVSIHRQDNKCLELSLPSRAAALSFVSLVDGYFRLTADSSHYLCHEVAPPRLVMSIRDGIHGPLLEPFVQAKLRPEDGLYLIHWSTSHPYRLILTVAQRSQAPDGMQSLRLRKFPIEQQDGAFVLEGWGRSFPSVRELGAALQGCLLRAGDDCFSLRRCCLPQPGETSNLIIMRGARASPRTLNLSQLSFHRVDQKEITQLSHLGQGTRTNVYEGRLRVEGSGDPEEGKMDDEDPLVPGRDRGQELRVVLKVLDPSHHDIALAFYETASLMSQVSHTHLAFVHGVCVRGPENIMVTEYVEHGPLDVWLRRERGHVPMAWKMVVAQQLASALSYLENKNLVHGNVCGRNILLARLGLAEGTSPFIKLSDPGVGLGALSREERVERIPWLAPECLPGGANSLSTAMDKWGFGATLLEICFDGEAPLQSRSPSEKEHFYQRQHRLPEPSCPQLATLTSQCLTYEPTQRPSFRTILRDLTRLQPHNLADVLTVNPDSPASDPTVFHKRYLKKIRDLGEGHFGKVSLYCYDPTNDGTGEMVAVKALKADCGPQHRSGWKQEIDILRTLYHEHIIKYKGCCEDQGEKSLQLVMEYVPLGSLRDYLPRHSIGLAQLLLFAQQICEGMAYLHSQHYIHRDLAARNVLLDNDRLVKIGDFGLAKAVPEGHEYYRVREDGDSPVFWYAPECLKEYKFYYASDVWSFGVTLYELLTHCDSSQSPPTKFLELIGIAQGQMTVLRLTELLERGERLPRPDKCPCEVYHLMKNCWETEASFRPTFENLIPILKTVHEKYQGQAPSVFSVC

SEQ ID NO: 653 - protein, 1187 aa, Homo sapiens
MPLRHWGMARGSKPVGDGAQPMAAMGGLKVLLHWAGPGGGEPWVTFSESSLTAEEVCIHIAHKVGITPPCFNLFALFDAQAQVWLPPNHILEIPRDASLMLYFRIRFYFRNWHGMNPREPAVYRCGPPGTEASSDQTAQGMQLLDPASFEYLFEQGKHEFVNDVASLWELSTEEEIHHFKNESLGMAFLHLCHLALRHGIPLEEVAKKTSFKDCIPRSFRRHIRQHSALTRLRLRNVFRRFLRDFQPGRLSQQMVMVKYLATLERLAPRFGTERVPVCHLRLLAQAEGEPCYIRDSGVAPTDPGPESAAGPPTHEVLVTGTGGIQWWPVEEEVNKEEGSSGSSGRNPQASLFGKKAKAHKAVGQPADRPREPLWAYFCDFRDITHVVLKEHCVSIHRQDNKCLELSLPSRAAALSFVSLVDGYFRLTADSSHYLCHEVAPPRLVMSIRDGIHGPLLEPFVQAKLRPEDGLYLIHWSTSHPYRLILTVAQRSQAPDGMQSLRLRKFPIEQQDGAFVLEGWGRSFPSVRELGAALQGCLLRAGDDCFSLRRCCLPQPGETSNLIIMRGARASPRTLNLSQLSFHRVDQKEITQLSHLGQGTRTNVYEGRLRVEGSGDPEEGKMDDEDPLVPGRDRGQELRVVLKVLDPSHHDIALAFYETASLMSQVSHTHLAFVHGVCVRGPENSMVTEYVEHGPLDVWLRRERGHVPMAWKMVVAQQLASALSYLENKNLVHGNVCGRNILLARLGLAEGTSPFIKLSDPGVGLGALSREERVERIPWLAPECLPGGANSLSTAMDKWGFGATLLEICFDGEAPLQSRSPSEKEHFYQRQHRLPEPSCPQLATLTSQCLTYEPTQRPSFRTILRDLTRLQPHNLADVLTVNPDSPASDPTVFHKRYLKKIRDLGEGHFGKVSLYCYDPTNDGTGEMVAVKALKADCGPQHRSGWKQEIDILRTLYHEHIIKYKGCCEDQGEKSLQLVMEYVPLGSLRDYLPRHSIGLAQLLLFAQQICEGMAYLHSQHYIHRDLAARNVLLDNDRLVKIGDFGLAKAVPEGHEYYRVREDGDSPVFWYAPECLKEYKFYYASDVWSFGVTLYELLTHCDSSQSPPTKFLELIGIAQGQMTVLRLTELLERGERLPRPDKCPCEVYHLMKNCWETEASFRPTFENLIPILKTVHEKYQGQAPSVFSVC

SEQ ID NO: 654 - protein, 1036 aa, Homo sapiens
MPLRHWGMARGSKPVGDGAQPMAAMGGLKVLLHWAGPGGGEPWVTFSESSLTAEEVCIHIAHKVGITPPCFNLFALFDAQAQVWLPPNHILEIPRDASLMLYFRIRFYFRNWHGMNPREPAVYRCGPPGTEASSDQTAQGMQLLDPASFEYLFEQGKHEFVNDVASLWELSTEEEIHHFKNESLGMAFLHLCHLALRHGIPLEEVAKKTSFKDCIPRSFRRHIRQHSALTRLRLRNVFRRFLRDFQPGRLSQQMVMVKYLATLERLAPRFGTERVPVCHLRLLAQAEGEPCYIRDSGVAPTDPGPESAAGPPTHEVLVTGTGGIQWWPVEEEVNKEEGSSGSSGRNPQASLFGKKAKAHKAVGQPADRPREPLWAYFCDFRDITHVVLKEHCVSIHRQDNKCLELSLPSRAAALSFVSLVDGYFRLTADSSHYLCHEVAPPRLVMSIRDGIHGPLLEPFVQAKLRPEDGLYLIHWSTSHPYRLILTVAQRSQAPDGMQSLRLRKFPIEQQDGAFVLEGWGRSFPSVRELGAALQGCLLRAGDDCFSLRRCCLPQPGETSNLIIMRGARASPRTLNLSQLSFHRVDQKEITQLSHLGQGTRTNVYEGRLRVEGSGDPEEGKMDDEDPLVPGRDRGQELRVVLKVLDPSHHDIALAFYETASLMSQVSHTHLAFVHGVCVRGPENIMVTEYVEHGPLDVWLRRERGHVPMAWKMVVAQQLASALSYLENKNLVHGNVCGRNILLARLGLAEGTSPFIKLSDPGVGLGALSREERVERIPWLAPECLPGGANSLSTAMDKWGFGATLLEICFDGEAPLQSRSPSEKEHFYQRQHRLPEPSCPQLATLTSQCLTYEPTQRPSFRTILRDLTRLQPHNLADVLTVNPDSPASDPTVFHKRYLKKIRDLGEGHFGKVSLYCYDPTNDGTGEMVAVKALKADCGPQHRSGWKQEIDILRTLYHEHIIKYKGCCEDQGHGLSALAALHPPRPSRAQRAAGQRQAGQDRGLWPSQGRARRPRVLPRARGWGQPRVLVCPRVPEGV

SEQ ID NO: 655 - protein, 890 aa, Homo sapiens
MALRRSMGRPGLPPLPLPPPPRLGLLLAALASLLLPESAAAGLKLMGAPVKLTVSQGQPVKLNCSVEGMEEPDIQWVKDGAVVQNLDQLYIPVSEQHWIGFLSLKSVERSDAGRYWCQVEDGGETEISQPVWLTVEGVPFFTVEPKDLAVPPNAPFQLSCEAVGPPEPVTIVWWRGTTKIGGPAPSPSVLNVTGVTQSTMFSCEAHNLKGLASSRTATVHLQALPAAPFNITVTKLSSSNASVAWMPGADGRALLQSCTVQVTQAPGGWEVLAVVVPVPPFTCLLRDLVPATNYSLRVRCANALGPSPYADWVPFQTKGLAPASAPQNLHAIRTDSGLILEWEEVNPEAPLEGPLGPYKLSWVQDNGTQDELTVEGTRANLTGWDPQKDLIVRVCVSNAVGCGPWSQPLVVSSHDRAGQQGPPHSRTSWVPVVLGVLTALVTAAALALILLRKRRKETRFGQAFDSVMARGEPAVHFRAARSFNRERPERIEATLDSLGISDELKEKLEDVLIPEQQFTLGRMLGKGEFGSVREAQLKQEDGSFVKVAVKMLKADIIASSDIEEFLREAACMKEFDHPHVAKLVGVSLRSRAKGRLPIPMVILPFMKHGDLHAFLLASRIGENPFNLPLQTLIRFMVDIACGMEYLSSRNFIHRDLAARNCMLAEDMTVCVADFGLSRKIYSGDYYRQGCASKLPVKWLALESLADNLYTVQSDVWAFGVTMWEIMTRGQTPYAGIENAEIYNYLIGGNRLKQPPECMEDVYDLMYQCWSADPKQRPSFTCLRMELENILGQLSVLSASQDPLYINIERAEEPTAGGSLELPGRDQPYSGAGDGSGMGAVGGTPSDCRYILTPGGLAEQPGQAEHQPESPLNETQRLLLLQQGLLPHSSC

SEQ ID NO: 656 - protein, 1338 aa, Homo sapiens
MVSYWDTGVLLCALLSCLLLTGSSSGSKLKDPELSLKGTQHIMQAGQTLHLQCRGEAAHKWSLPEMVSKESERLSITKSACGRNGKQFCSTLTLNTAQANHTGFYSCKYLAVPTSKKKETESAIYIFISDTGRPFVEMYSEIPEIIHMTEGRELVIPCRVTSPNITVTLKKFPLDTLIPDGKRIIWDSRKGFIISNATYKEIGLLTCEATVNGHLYKTNYLTHRQTNTIIDVQISTPRPVKLLRGHTLVLNCTATTPLNTRVQMTWSYPDEKNKRASVRRRIDQSNSHANIFYSVLTIDKMQNKDKGLYTCRVRSGPSFKSVNTSVHIYDKAFITVKHRKQQVLETVAGKRSYRLSMKVKAFPSPEVVWLKDGLPATEKSARYLTRGYSLIIKDVTEEDAGNYTILLSIKQSNVFKNLTATLIVNVKPQIYEKAVSSFPDPALYPLGSRQILTCTAYGIPQPTIKWFWHPCNHNHSEARCDFCSNNEESFILDADSNMGNRIESITQRMAIIEGKNKMASTLVVADSRISGIYICIASNKVGTVGRNISFYITDVPNGFHVNLEKMPTEGEDLKLSCTVNKFLYRDVTWILLRTVNNRTMHYSISKQKMAITKEHSITLNLTIMNVSLQDSGTYACRARNVHTGEEILQKKEITIRDQEAPYLLRNLSDHTVAISSSTTLDCHANGVPEPQITWFKNNHKIQQEPGIILGPGSSTLFIERVTEEDEGVYHCKATNQKGSVESSAYLTVQGTSDKSNLELITLTCTCVAATLFWLLLTLLIRKMKRSSSEIKTDYLSIIMDPDEVPLDEQCERLPYDASKWEFARERLKLGKSLGRGAFGKVVQASAFGIKKSPTCRTVAVKMLKEGATASEYKALMTELKILTHIGHHLNVVNLLGACTKQGGPLMVIVEYCKYGNLSNYLKSKRDLFFLNKDAALHMEPKKEKMEPGLEQGKKPRLDSVTSSESFASSGFQEDKSLSDVEEEEDSDGFYKEPITMEDLISYSFQVARGMEFLSSRKCIHRDLAARNILLSENNVVKICDFGLARDIYKNPDYVRKGDTRLPLKWMAPESIFDKIYSTKSDVWSYGVLLWEIFSLGGSPYPGVQMDEDFCSRLREGMRMRAPEYSTPEIYQIMLDCWHRDPKERPRFAELVEKLGDLLQANVQQDGKDYIPINAILTGNSGFTYSTPAFSEDFFKESISAPKFNSGSSDDVRYVNAFKFMSLERIKTFEELLPNATSMFDDYQGDSSTLLASPMLKRFTWTDSKPKASLKIDLRVTSKSKESGLSDVSRPSFCHSSCGHVSEGKRRFTYDHAELERKIACCSPPPDYNSVVLYSTPPI

SEQ ID NO: 657 - protein, 1338 aa, Homo sapiens
MVSYWDTGVLLCALLSCLLLTGSSSGSKLKDPELSLKGTQHIMQAGQTLHLQCRGEAAHKWSLPEMVSKESERLSITKSACGRNGKQFCSTLTLNTAQANHTGFYSCKYLAVPTSKKKETESAIYIFISDTGRPFVEMYSEIPEIIHMTEGRELVIPCRVTSPNITVTLKKFPLDTLIPDGKRIIWDSRKGFIISNATYKEIGLLTCEATVNGHLYKTNYLTHRQTNTIIDVQISTPRPVKLLRGHTLVLNCTATTPLNTRVQMTWSYPDEKNKRASVRRRIDQSNSHANIFYSVLTIDKMQNKDKGLYTCRVRSGPSFKSVNTSVHIYDKAFITVKHRKQQVLETVAGKRSYRLSMKVKAFPSPEVVWLKDGLPATEKSARYLTRGYSLIIKDVTEEDAGNYTILLSIKQSNVFKNLTATLIVNVKPQIYEKAVSSFPDPALYPLGSRQILTCTAYGIPQPTIKWFWHPCNHNHSEARCDFCSNNEESFILDADSNMGNRIESITQRMAIIEGKNKMASTLVVADSRISGIYICIASNKVGTVGRNISFYITDVPNGFHVNLEKMPTEGEDLKLSCTVNKFLYRDVTWILLRTVNNRTMHYSISKQKMAITKEHSITLNLTIMNVSLQDSGTYACRARNVYTGEEILQKKEITIRDQEAPYLLRNLSDHTVAISSSTTLDCHANGVPEPQITWFKNNHKIQQEPGIILGPGSSTLFIERVTEEDEGVYHCKATNQKGSVESSAYLTVQGTSDKSNLELITLTCTCVAATLFWLLLTLLIRKMKRSSSEIKTDYLSIIMDPDEVPLDEQCERLPYDASKWEFARERLKLGKSLGRGAFGKVVQASAFGIKKSPTCRTVAVKMLKEGATASEYKALMTELKILTHIGHHLNVVNLLGACTKQGGPLMVIVEYCKYGNLSNYLKSKRDLFFLNKDAALHMEPKKEKMEPGLEQGKKPRLDSVTSSESFASSGFQEDKSLSDVEAEEDSDGFYKEPITMEDLISYSFQVARGMEFLSSRKCIHRDLAARNILLSENNVVKICDFGLARDIYKNPDYVRKGDTRLPLKWMAPESIFDKIYSTKSDVWSYGVLLWEIFSLGGSPYPGVQMDEDFCSRLREGMRMRAPEYSTPEIYQIMLDCWHRDPKERPRFAELVEKLGDLLQANVQQDGKDYIPINAILTGNSGFTYSTPAFSEDFFKESISAPKFNSGSSDDVRYVNAFKFMSLERIKTFEELLPNATSMFDDYQGDSSTLLASPMLKRFTWTDSKPKASLKIDLRVTSKSKESGLSDVSRPSFCHSSCGHVSEGKRRFTYDHAELERKIACCSPPPDYNSVVLYSTPPI

SEQ ID NO: 658 - protein, 1338 aa, Homo sapiens
MVSYWDTGVLLCALLSCLLLTGSSSGSKLKDPELSLKGTQHIMQAGQTLHLQCRGEAAHKWSLPEMVSKESERLSITKSACGRNGKQFCSTLTLNTAQANHTGFYSCKYLAVPTSKKKETESAIYIFISDTGRPFVEMYSEIPEIIHMTEGRELVIPCRVTSPNITVTLKKFPLDTLIPDGKRIIWDSRKGFIISNATYKEIGLLTCEATVNGHLYKTNYLTHRQTNTIIDVQISTPRPVKLLRGHTLVLNCTATTPLNTRVQMTWSYPDEKNKRASVRRRIDQSNSHANIFYSVLTIDKMQNKDKGLYTCRVRSGPSFKSVNTSVHIYDKAFITVKHRKQQVLETVAGKRSYRLSMKVKAFPSPEVVWLKDGLPATEKSARYLTRGYSLIIKDVTEEDAGNYTILLSIKQSNVFKNLTATLIVNVKPQIYEKAVSSFPDPALYPLGSRQILTCTAYGIPQPTIKWFWHPCNHNHSEARCDFCSNNEESFILDADSNMGNRIESITQRMAIIEGKNKMASTLVVADSRISGIYICIASNKVGTVGRNISFYITDVPNGFHVNLEKMPTEGEDLKLSCTVNKFLYRDVTWILLRTVNNRTMHYSISKQKMAITKEHSITLNLTIMNVSLQDSGTYACRARNVYTGEEILQKKEITIRDQEAPYLLRNLSDHTVAISSSTTLDCHANGVPEPQITWFKNNHKIQQEPGIILGPGSSTLFIERVTEEDEGVYHCKATNQKGSVESSAYLTVQGTSDKSNLELITLTCTCVAATLFWLLLTLLIRKMKRSSSEIKTDYLSIIMDPDEVPLDEQCERLPYDASKWEFARERLKLGKSLGRGAFGKVVQASAFGIKKSPTCRTVAVKMLKEGATASEYKALMTELKILTHIGHHLNVVNLLGACTKQGGPLMVIVEYCKYGNLSNYLKSKRDLFFLNKDAALHMEPKKEKMEPGLEQGKKPRLDSVTSSESFASSGFQEDKSLSDVEEEEDSDGFYKEPITMEDLISYSFQVARGMEFLSSRKCIHRDLAARNILLSENNVVKICDFGLARDIYKNPDYVRKGDTRLPLKWMAPESIFDKIYSTKSDVWSYGVLLWEIFSLGGSPYPGVQMDEDFCSRLREGMRMRAPEYSTPEIYQIMLDCWHRDPKERPRFAELVEKLGDLLQANVQQDGKDYIPINAILTGNSGFTYSTPAFSEDFFKESISALKFNSGSSDDVRYVNAFKFMSLERIKTFEELLPNATSMFDDYQGDSSTLLASPMLKRFTWTDSKPKASLKIDLRVTSKSKESGLSDVSRPSFCHSSCGHVSEGKRRFTYDHAELERKIACCSPPPDYNSVVLYSTPPI

SEQ ID NO: 659 - protein, 1356 aa, Homo sapiens [sequence omitted]

SEQ ID NO: 660 - protein, 1356 aa, Homo sapiens [sequence omitted]

SEQ ID NO: 661 - protein, 1356 aa, Homo sapiens
MQSKVLLAVALWLCVETRAASVGLPSVSLDLPRLSIQKDILTIKANTTLQITCRGQRDLDWLWPNNQSGSEQRVEVTECSDGLFCKTLTIPKVIGNDTGAYKCFYRETDLASVIYVYVQDYRSPFIASVSDQHGVVYITENKNKTVVIPCLGSISNLNVSLCARYPEKRFVPDGNRISWDSKKGFTIPSYMISYAGMVFCEAKINDESYQSIMYIVVVVGYRIYDVVLSPSHGIELSVGEKLVLNCTARTELNVGIDFNWEYPSSKHQHKKLVNRDLKTQSGSEMKKFLSTLTIDGVTRSDQGLYTCAASSGLMTKKNSTFVRVHEKPFVAFGSGMESLVEATVGERVRIPAKYLGYPPPEIKWYKNGIPLESNHTIKAGHVLTIMEVSERDTGNYTVILTNPISKEKQSHVVSLVVYVPPQIGEKSLISPVDSYQYGTTQTLTCTVYAIPPPHHIHWYWQLEEECANEPSQAVSVTNPYPREEWRSVEDFQGGNKIEVNKNQFALIEGKNKTVSTLVIQAANVSALYKCEAVNKVGRGERVISFHVTRGPEITLQPDMQPTEQESVSLWCTADRSTFENLTWYKLGPQPLPIHVGELPTPVCKNLDTLWKLNATMFSNSTNDILIMELKNASLQDQGDYVCLAQDRKTKKRHCVVRQLTVLERVAPTITGNLENQTTSIGESIEVSCTASGNPPPQIMWFKDNETLVEDSGIVLKDGNRNLTIRRVRKEDEGLYTCQACSVLGCAKVEAFFIIEGAQEKTNLEIIILVGTAVIAMFFWLLLVIILRTVKRANGGELKTGYLSIVMDPDELPLDEHCERLPYDASKWEFPRDRLKLGKPLGRGAFGQVIEADAFGIDKTATCRTVAVKMLKEGATHSEHRALMSELKILIHIGHHLNVVNLLGACTKPGGPLMVIVEFCKFGNLSTYLRSKRNEFVPYKTKGARFRQGKDYVGAIPVDLKRRLDSITSSQSSASSGFVEEKSLSDVEEEEAPEDLYKDFLTLEHLICYSFQVAKGMEFLASRKCIHRDLAARNILLSEKNVVKICDFGLARDIYKDPDYVRKGDARLPLKWMAPETIFDRVYTIQSDVWSFGVLLWEIFSLGASPYPGVKIDEEFCRRLKEGTRMRAPDYTTPEMYQTMLDCWHGEPSQRPTFSELVEHLGNLLQANAQQDGKDYIVLPISETLSMEEDSGLSLPTSPVSCMEEEEVCDPKFHYDNTAGISQYLQNSKRKSRPVSVKTFEDIPLEEPEVKVIPDDNQTDSGMVLASEELKTLEDRTKLSPSFGGMVPSKSRESVASEGSNQTSGYQSGYHSDDTDTTVYSSEEAELLKLIEIGVQTGSTAQILQPDSGTTLSSPPV

SEQ ID NO: 662 - protein, 1356 aa, Homo sapiens
MQSKVLLAVALWLCVETRAASVGLPSVSLDLPRLSIQKDILTIKANTTLQITCRGQRDLDWLWPNNQSGSEQRVEVTECSDGLFCKTLTIPKVIGNDTGAYKCFYRETDLASVIYVYVQDYRSPFIASVSDQHGVVYITENKNKTVVIPCLGSISNLNVSLCARYPEKRFVPDGNRISWDSKKGFTIPSYMISYAGMVFCEAKINDESYQSIMYIVVVVGYRIYDVVLSPSHGIELSVGEKLVLNCTARTELNVGIDFNWEYPSSKHQHKKLVNRDLKTQSGSEMKKFLSTLTIDGVTRSDQGLYTCAASSGLMTKKNSTFVRVHEKPFVAFGSGMESLVEATVGERVRIPAKYLGYPPPEIKWYKNGIPLESNHTIKAGHVLTIMEVSERDTGNYTVILTNPISKEKQSHVVSLVVYVPPQIGEKSLISPVDSYQYGTTQTLTCTVYAIPPPHHIHWYWQLEEECANEPSQAVSVTNPYPCEEWRSVEDFQGGNKIEVNKNQFALIEGKNKTVSTLVIQAANVSALYKCEAVNKVGRGERVISFHVTRGPEITLQPDMQPTEQESVSLWCTADRSTFENLTWYKLGPQPLPIHVGELPTPVCKNLDTLWKLNATMFSNSTNDILIMELKNASLQDQGDYVCLAQDRKTKKRHCVVRQLTVLERVAPTITGNLENQTTSIGESIEVSCTASGNPPPQIMWFKDNETLVEDSGIVLKDGNRNLTIRRVRKEDEGLYTCQACSVLGCAKVEAFFIIEGAQEKTNLEIIILVGTAVIAMFFWLLLVIILRTVKRANGGELKTGYLSIVMDPDELPLDEHCERLPYDASKWEFPRDRLKLGKPLGRGAFGQVIEADAFGIDKTATCRTVAVKMLKEGATHSEHRALMSELKILIHIGHHLNVVNLLGACTKPGGPLMVIVEFCKFGNLSTYLRSKRNEFVPYKTKGARFRQGKDYVGAIPVDLKRRLDSITSSQSSASSGFVEEKSLSDVEEEEAPEDLYKDFLTLEHLICYSFQVAKGMEFLASRKCIHRDLAARNILLSEKNVVKICDFGLARDIYKDPDYVRKGDARLPLKWMAPETIFDRVYTIQSDVWSFGVLLWEIFSLGASPYPGVKIDEEFCRRLKEGTRMRAPDYTTPEMYQTMLDCWHGESSQRPTFSELVEHLGNLLQANAQQDGKDYIVLPISETLSMEEDSGLSLPTSPVSCMEEEEVCDPKFHYDNTAGISQYLQNSKRKSRPVSVKTFEDIPLEEPEVKVIPDDNQTDSGMVLASEELKTLEDRTKLSPSFGGMVPSKSRESVASEGSNQTSGYQSGYHSDDTDTTVYSSEEAELLKLIEIGVQTGSTAQILQPDSGTTLSSPPV

SEQ ID NO: 663 - protein, 1363 aa, Homo sapiens
MQRGAALCLRLWLCLGLLDGLVSDYSMTPPTLNITEESHVIDTGDSLSISCRGQHPLEWAWPGAQEAPATGDKDSEDTGVVRDCEGTDARPYCKVLLLHEVHANDTGSYVCYYKYIKARIEGTTAASSYVFVRDFEQPFINKPDTLLVNRKDAMWVPCLVSIPGLNVTLRSQSSVLWPDGQEVVWDDRRGMLVSTPLLHDALYLQCETTWGDQDFLSNPFLVHITGNELYDIQLLPRKSLELLVGEKLVLNCTVWAEFNSGVTFDWDYPGKQAERGKWVPERRSQQTHTELSSILTIHNVSQHDLGSYVCKANNGIQRFRESTEVIVHENPFISVEWLKGPILEATAGDELVKLPVKLAAYPPPEFQWYKDGKALSGRHSPHALVLKEVTEASTGTYTLALWNSAAGLRRNISLELVVNVPPQIHEKEASSPSIYSRHSRQALTCTAYGVPLPLSIQWHWRPWTPCKMFAQRSLRRRQQQDLMPQCRDWRAVTTQDAVNPIESLDTWTEFVEGKNKTVSKLVIQNANVSAMYKCVVSNKVGQDERLIYFYVTTIPDGFTIESKPSEELLEGQPVLLSCQADSYKYEHLRWYRLNLSTLHDAHGNPLLLDCKNVHLFATPLAASLEEVAPGARHATLSLSIPRVAPEHEGHYVCEVQDRRSHDKHCHKKYLSVQALEAPRLTQNLTDLLVNVSDSLEMQCLVAGAHAPSIVWYKDERLLEEKSGVDLADSNQKLSIQRVREEDAGPYLCSVCRPKGCVNSSASVAVEGSEDKGSMEIVILVGTGVIAVFFWVLLLLIFCNMRRPAHADIKTGYLSIIMDPGEVPLEEQCEYLSYDASQWEFPRERLHLGRVLGYGAFGKVVEASAFGIHKGSSCDTVAVKMLKEGATASEHRALMSELKILIHIGNHLNVVNLLGACTKPQGPLMVIVEFCKYGNLSNFLRAKRDAFSPCAEKSPEQRGRFRAMVELARLDRRRPGSSDRVLFARFSKTEGGARRASPDQEAEDLWLSPLTMEDLVCYSFQVARGMEFLASRKCIHRDLAARNILLSESDVVKICDFGLARDIYKDPDYVRKGSARLPLKWMAPESIFDKVYTTQSDVWSFGVLLWEIFSLGASPYPGVQINEEFCQRVRDGTRMRAPELATPAIRHIMLNCWSGDPKARPAFSELVEILGDLLQGRGLQEEEEVCMAPRSSQSSEEGSFSQVSTMALHIAQADAEDSPPSLQRHSLAARYYNWVSFPGCLARGAETRGSSRMKTFEEFPMTPTTYKGSVDNQTDSGMVLASEEFEQIESRHRQESGFSCKGPGQNVAVTRAHPDSQGRRRRPERGARGGQVFYNSEYGELSEPSEEDHCSPSARVTFFTDNSY

SEQ ID NO: 664 - protein, 1363 aa, Homo sapiens
MQRGAALCLRLWLCLGLLDGLVSDYSMTPPTLNITEESHVIDTGDSLSISCRGQHPLEWAWPGAQEAPATGDKDSEDTGVVRDCEGTDARPYCKVLLLHEVHANDTGSYVCYYKYIKARIEGTTAASSYVFVRDFEQPFINKPDTLLVNRKDAMWVPCLVSIPGLNVTLRSQSSVLWPDGQEVVWDDRRGMLVSTPLLHDALYLQCETTWGDQDFLSNPFLVHITGNELYDIQLLPRKSLELLVGEKLVLNCTVWAEFNSGVTFDWDYPGKQAERGKWVPERRSQQTHTELSSILTIHNVSQHDLGSYVCKANNGIQRFRESTEVIVHENPFISVEWLKGPILEATAGDELVKLPVKLAAYPPPEFQWYKDGKALSGRHSPHALVLKEVTEASTGTYTLALWNSAAGLRRNISLELVVNVPPQIHEKEASSPSIYSRHSRQALTCTAYGVPLPLSIQWHWRPWTPCKMFAQRSLRRRQQQDLMPQCRDWRAVTTQDAVNPIESLDTWTEFVEGKNKTVSKLVIQNANVSAMYKCVVSNKVGQDERLIYFYVTTIPDGFTIESKPSEELLEGQPVLLSCQADSYKYEHLRWYRLNLSTLHDAHGNPLLLDCKNVHLFATPLAASLEEVAPGARHATLSLSIPRVAPEHEGHYVCEVQDRRSHDKHCHKKYLSVQALEAPRLTQNLTDLLVNVSDSLEMQCLVAGAHAPSIVWYKDERLLEEKSGVDLADSNQKLSIQRVREEDAGPYLCSVCRPKGCVNSSASVAVEGSEDKGSMEIVILVGTGVIAVFFWVLLLLIFCNMRRPAHADIKTGYLSIIMDPGEVPLEEQCEYLSYDASQWEFPRERLHLGRVLGYGAFGKVVEASAFGIHKGSSCDTVAVKMLKEGATASEQRALMSELKILIHIGNHLNVVNLLGACTKPQGPLMVIVEFCKYGNLSNFLRAKRDAFSPCAEKSPEQRGRFRAMVELARLDRRRPGSSDRVLFARFSKTEGGARRASPDQEAEDLWLSPLTMEDLVCYSFQVARGMEFLASRKCIHRDLAARNILLSESDVVKICDFGLARDIYKDPDYVRKGSARLPLKWMAPESIFDKVYTTQSDVWSFGVLLWEIFSLGASPYPGVQINEEFCQRVRDGTRMRAPELATPAIRHIMLNCWSGDPKARPAFSELVEILGDLLQGRGLQEEEEVCMAPRSSQSSEEGSFSQVSTMALHIAQADAEDSPPSLQRHSLAARYYNWVSFPGCLARGAETRGSSRMKTFEEFPMTPTTYKGSVDNQTDSGMVLASEEFEQIESRHRQESGFSCKGPGQNVAVTRAHPDSQGRRRQPERGARGGQVFYNSEYGELSEPSEEDHCSPSARVTFFTDNSY

SEQ ID NO: 665 - protein, 185 aa, Homo sapiens
MPDPAAHLPFFYGSISRAEAEEHLKLAGMADGLFLLRQCLRSLGGYVLSLVHDVRFHHFPIERQLNGTYAIAGGKAHCGPAELCEFYSRDPDGLPCNLRKPCNRPSGLEPQPGVFDCLRDAMVRDYVRQTWKLEGEALEQAIISQAPQVEKLIATTAHERMPWYHSSLTREEAERKLYSGAQTDG

SEQ ID NO: 666 - protein, 613 aa, Homo sapiens
MPDPAAHLPFFYGSISRAEAEEHLKLAGMADGLFLLRQCLRSLGGYVLSLVHDVRFHHFPIERQLNGTYAIAGGKAHCGPAELCEFYSRDPDGLPCNLRKPCNRPSGLEPQPGVFDCLRDAMVRDYVRQTWKLEGEALEQAIISQAPQVEKLIATTAHERMPWYHSSLTREEAERKLYSGAQTDGKFLLRPRKEQGTYALSLIYGKTVYHYLISQDKAGKYCIPEGTKFDTLWQLVEYLKLKADGLIYCLKEACPNSSASNASGAAAPTLPAHPSTLTHPQRRIDTLNSDGYTPEPDKPRPMPMDTSVYESPYSDPEELKDKKLFLKRDNLLIADIELGCGNFGSVRQGVYRMRKKQIDVAIKVLKQGTEKADTEEMMREAQIMHQLDNPYIVRLIGVCQAEALMLVMEMAGGGPLHKFLVGKREEIPVSNVAELLHQVSMGMKYLEEKNFVHRDLAARNVLLVNRHYAKISDFGLSKALGADDSYYTARSAGKWPLKWYAPECINFRKFSSRSDVWSYGVTMWEALSYGQKPYKKMKGPEVMAFIEQGKRMECPPECPPELYALMSDCWIYKWEDRPDFLTVEQRMRACYYSLASKVEGPPGSTQKAEAACA

SEQ ID NO: 667 - DNA, 3816 bp, Homo sapiens
atggccaagcagcctgggcgctcagtgcagctcctcaagtccacagacgtgggccggcacagcctcctgtacctgaaggaaatcggccgtggctggttcgggaaggtgttcctgggggaggtgaactctggcatcagcagtgcccaggtggtggtgaaggagctgcaggctagtgccagcgtgcaggagcagatgcagttcctggaggaggtgcagccctacagggccctgaagcacagcaacctgctccagtgcctggcccagtgcgccgaggtgacgccctacctgctggtgatggagttctgcccactgggggacctcaagggctacctgcggagctgccgggtggcggagtccatggctcccgacccccggaccctgcagcgcatggcctgtgaggtggcctgtggcgtcctgcaccttcatcgcaacaatttcgtgcacagcgacctggccctgcggaactgcctgctcacggctgacctgacggtgaagattggtgactatggcctggctcactgcaagtacagagaggactacttcgtgactgccgaccagctgtgggtgcctctgcgctggatcgcgccagagctggtggacgaggtgcatagcaacctgctcgtcgtggaccagaccaagagcgggaatgtgtggtccctgggcgtgaccatctgggagctctttgagctgggcacgcagccctatccccagcactcggaccagcaggtgctggcgtacacggtccgggagcagcagctcaagctgcccaagccccagctgcagctgaccctgtcggaccgctggtacgaggtgatgcagttctgctggctgcagcccgagcagcggcccacagccgaggaggtgcacctgctgctgtcctacctgtgtgccaagggcgccaccgaagcagaggaggagtttgaacggcgctggcgctctctgcggcccggcgggggcggcgtggggcccgggcccggtgcggcggggcccatgctgggcggcgtggtggagctcgccgctgcctcgtccttcccgctgctggagcagttcgcgggcgacggcttccacgcggacggcgacgacgtgctgacggtgaccgagaccagccgaggcctcaattttgagtacaagtgggaggcgggccgcggcgcggaggccttcccggccacgctgagccctggccgcaccgcacgcctgcaggagctgtgcgcccccgacggcgcgcccccgggcgtggttccggtgctcagcgcgcacagcccgtcgctgggcagcgagtacttcatccgcctagaggaggccgcacccgccgccggccacgaccctgactgcgccggctgcgcccccagtccacctgccaccgcggaccaggacgacgactctgacggcagcaccgccgcctcgctggccatggagccgctgctgggccacgggccacccgtcgacgtcccctggggccgcggcgaccactaccctcgcagaagcttggcgcgggacccgctctgcccctcacgctctccctcgccctcggcggggcccctgagtctggcggagggaggagcggaggatgcagactggggcgtggccgccttctgtcctgccttcttcgaggacccactgggcacgtcccctttggggagctcaggggcgcccccgctgccgctgactggcgaggatgagctagaggaggtgggagcgcggagggccgcccagcgcgggcactggcgctccaacgtgtcagccaacaacaacagcggcagccgctgtccagagtcctgggaccccgtctctgcgggctgccacgctgagggctgccccagtccaaagcagaccccacgggcctcccccgagccggggtaccctggagagcctctgcttgggctccaggcagcctctgcccaggagccaggctgctgccccggcctccctcatctatgctctgcccagggcctggcacctgctccctgcctggttacaccctcctggacagagacagccagtagtgggggtgaccacccgcaggcagagcccaagcttgccacggaggctgagggcactaccggaccccgcctgccccttccttccgtcccctccccatcccaggagggagccccacttccctcggaggaggccagtgcccccgacgcccctgatgccctgcctgactctcccacgcctgctactggtggcgaggtgtctgccatcaagctggcttctgccctgaatggcagcagcagctctcccgaggtggaggcacccagcagtgaggatgaggacacggccgaggccacctcaggcatcttcaccgacacgtccagcgacggcctgcaggccaggaggccggatgtggtgccagccttccgctctctgcagaagcaggtggggacccccgactccctggactccctggacatcccgtcctcagccagtgatggtggctatgaggtcttcagcccgtcggccactggcccctctggagggcagccgcgagcgctggacagtggctatgacaccgagaactatgagtcccctgagtttgtgctcaaggaggcgcaggaagggtgtgagccccaggcctttgcggagctggcctcagagggtgagggccccgggcccgagacacggctctccacctccctcagtggcctcaacgagaagaatccctaccgagactctgcctacttctcagacctcgaggctgaggccgaggccacctcaggcccagagaagaagtgcggcggggaccgagcccccgggccagagctgggcctgccgagcactgggcagccgtctgagcaggtctgtctcaggcctggggtttccggggaggcacaaggctctggccccggggaggtgctgcccccactgctgcagcttgaagggtcctccccagagcccagcacctgcccctcgggcctggtcccagagcctccggagccccaaggcccagccaaggtgcggcctgggcccagccccagctgctcccagtttttcctgctgaccccggttccgctgagatcagaaggcaacagctctgagttccaggggcccccaggactgttgtcagggccggccccacaaaagcggatggggggcccaggcacccccagagccccactccgcctggctctgcccggcctccctgcggccttggagggccggccggaggaggaggaggaggacagtgaggacagcgacgagtctgacgaggagctccgctgctacagcgtccaggagcctagcgaggacagcgaagaggaggcgccggcggtgcccgtggtggtggctgagagccagagcgcgcgcaacctgcgcagcctgctcaagatgcccagcctgctgtccgagaccttctgcgaggacctggaacgcaagaagaaggccgtgtccttcttcgacgacgtcaccgtctacctctttgaccaggaaagccccacccgggagctcggggagcccttcccgggcgccaaggaatcgccccctacgttccttagggggagccccggctctcccagcgcccccaaccggccgcagcaggctgatggctccccaaatggctccacagcggaagagggtggtgggttcgcgtgggacgacgacttcccgctgatgacggccaaggcagccttcgccatggccctagacccggccgcacccgccccggctgcgcccacgcccacgcccgctcccttctcgcgcttcacggtgtcgcccgcgcccacgtcccgcttctccatcacgcacgtgtctgactcggacgccgagtccaagagaggacctgaagctggtgccgggggtgagagtaaagaggcttga

SEQ ID NO: 668 - DNA, 3816 bp, Homo sapiens
atggccaagcagcctgggcgctcagtgcagctcctcaagtccacagacgtgggccggcacagcctcctgtacctgaaggaaatcggccgtggctggttcgggaaggtgttcctgggggaggtgaactctggcatcagcagtgcccaggtggtggtgaaggagctgcaggctagtgccagcgtgcaggagcagatgcagttcctggaggaggtgcagccctacagggccctgaagcacagcaacctgctccagtgcctggcccagtgcgccgaggtgacgccctacctgctggtgatggagttctgcccactgggggacctcaagggctacctgcggagctgccgggtggcggagtccatggctcccgacccccggaccctgcagcgcatggcctgtgaggtggcctgtggcgtcctgcaccttcatcgcaacaatttcgtgcacagcgacctggccctgcggaactgcctgctcacggctgacctgacggtgaagattggtgactatggcctggctcactgcaagtacagagaggactacttcgtgactgccgaccagctgtgggtgcctctgcgctggatcgcgccagagctggtggacgaggtgcatagcaacctgctcgtcgtggaccagaccaagagcgggaatgtgtggtccctgggcgtgaccatctgggagctctttgagctgggcacgcagccctatccccagcactcggaccagcaggtgctggcgtacacggtccgggagcagcagctcaagctgcccaagccccagctgcagctgaccctgtcggaccgctggtacgaggtgatgcagttctgctggctgcagcccgagcagcggcccacagccgaggaggtgcacctgctgctgtcctacctgtgtgccaagggcgccaccgaagcagaggaggagtttgaacggcgctggcgctctctgcggcccggcgggggcggcgtggggcccgggcccggtgcggcggggcccatgctgggcggcgtggtggagctcgccgctgcctcgtccttcccgctgctggagcagttcgcgggcgacggcttccacgcggacggcgacgacgtgctgacggtgaccgagaccagccgaggcctcaattttgagtacaagtgggaggcgggccgcggcgcggaggccttcccggccacgctgagccctggccgcaccgcacgcctgcaggagctgtgcgcccccgacggcgcgcccccgggcgtggttccggtgctcagcgcgcacagcccgtcgctgggcagcgagtacttcatccgcctagaggaggccgcacccgccgccggccacgaccctgactgcgccggctgcgcccccagtccacctgccaccgcggaccaggacgacgactctgacggcagcaccgccgcctcgctggccatggagccgctgctgggccacgggccacccgtcgacgtcccctggggccgcggcgaccactaccctcgcagaagcttggcgcgggacccgctctgcccctcacgctctccctcgccctcggcggggcccctgagtctggcggagggaggagcggaggatgcagactggggcgtggccgccttctgtcctgccttcttcgaggacccactgggcacgtcccctttggggagctcaggggcgcccccgctgccgctgactggcgaggatgagctagaggaggtgggagcgcggagggccgcccagcgcgggcactggcgctccaacgtgtcagccaacaacaacagcggcagccgctgtccagagtcctgggaccccgtctctgcgggcggccacgctgagggctgccccagtccaaagcagaccccacgggcctcccccgagccggggtaccctggagagcctctgcttgggctccaggcagcctctgcccaggagccaggctgctgccccagcctccctcatctatgctctgcccagggcctggcacctgctccctgcctggttacaccctcctggacagagacagccagtagtgggggtgaccacccgcaggcagagcccaagcttgccacggaggctgagggcactaccggaccccgcctgccccttccttccgtcccctccccatcccaggagggagccccacttccctcggaggaggccagtgcccccgacgcccctgatgccctgcctgactctcccacgcctgctactggtggcgaggtgtctgccatcaagctggcttctgccctgaatggcagcagcagctctcccgaggtggaggcacccagcagtgaggatgaggacacggccgaggccacctcaggcatcttcaccgacacgtccagcgacggcctgcaggccaggaggccggatgtggtgccagccttccgctctctgcagaagcaggtggggacccccgactccctggactccctggacatcccgtcctcagccagtgatggtggctatgaggtcttcagcccgtcggccactggcccctctggagggcagccgcgagcgctggacagtggctatgacaccgagaactatgagtcccctgagtttgtgctcaaggaggcgcaggaagggtgtgagccccaggcctttgcggagctggcctcagagggtgagggccccgggcccgagacacggctctccacctccctcagtggcctcaacgagaagaatccctaccgagactctgcctacttctcagacctcgaggctgaggccgaggccacctcaggcccagagaagaagtgcggcggggaccgagcccccgggccagagctgggcctgccgagcactgggcagccgtctgagcaggtctgtctcaggcctggggtttccggggaggcacaaggctctggccccggggaggtgctgcccccactgctgcagcttgaagggtcctccccagagcccagcacctgcccctcgggcctggtcccagagcctccggagccccaaggcccagccaaggtgcggcctgggcccagccccagctgctcccagtttttcctgctgaccccggttccgctgagatcagaaggcaacagctctgagttccaggggcccccaggactgttgtcagggccggccccacaaaagcggatggggggcccaggcacccccagagccccactccgcctggctctgcccggcctccctgcggccttggagggccggccggaggaggaggaggaggacagtgaggacagcgacgagtctgacgaggagctccgctgctacagcgtccaggagcctagcgaggacagcgaagaggaggcgccggcggtgcccgtggtggtggctgagagccagagcgcgcgcaacctgcgcagcctgctcaagatgcccagcctgctgtccgagaccttctgcgaggacctggaacgcaagaagaaggccgtgtccttcttcgacgacgtcaccgtctacctctttgaccaggaaagccccacccgggagctcggggagcccttcccgggcgccaaggaatcgccccctacgttccttagggggagccccggctctcccagcgcccccaaccggccgcagcaggctgatggctccccaaatggctccacagcggaagagggtggtgggttcgcgtgggacgacgacttcccgctgatgacggccaaggcagccttcgccatggccctagacccggccgcacccgccccggctgcgcccacgcccacgcccgctcccttctcgcgcttcacggtgtcgcccgcgcccacgtcccgcttctccatcacgcacgtgtctgactcggacgccgagtccaagagaggacctgaagctggtgccgggggtgagagtaaagaggcttga

SEQ ID NO: 669 - DNA, 3816 bp, Homo sapiens
atggccaagcagcctgggcgctcagtgcagctcctcaagtccacagacgtgggccggcacagcctcctgtacctgaaggaaatcggccgtggctggttcgggaaggtgttcctgggggaggtgaactctggcatcagcagtgcccaggtggtggtgaaggagctgcaggctagtgccagcgtgcaggagcagatgcagttcctggaggaggtgcagccctacagggccctgaagcacagcaacctgctccagtgcctggcccagtgcgccgaggtgacgccctacctgctggtgatggagttctgcccactgggggacctcaagggctacctgcggagctgccgggtggcggagtccatggctcccgacccccggaccctgcagcgcatggcctgtgaggtggcctgtggcgtcctgcaccttcatcgcaacaatttcgtgcacagcgacctggccctgcggaactgcctgctcacggctgacctgacggtgaagattggtgactatggcctggctcactgcaagtacagagaggactacttcgtgactgccgaccagctgtgggtgcctctgcgctggatcgcgccagagctggtggacgaggtgcatagcaacctgctcgtcgtggaccagaccaagagcgggaatgtgtggtccctgggcgtgaccatctgggagctctttgagctgggcacgcagccctatccccagcactcggaccagcaggtgctggcgtacacggtccgggagcagcagctcaagctgcccaagccccagctgcagctgaccctgtcggaccgctggtacgaggtgatgcagttctgctggctgcagcccgagcagcggcccacagccgaggaggtgcacctgctgctgtcctacctgtgtgccaagggcgccaccgaagcagaggaggagtttgaacggcgctggcgctctctgcggcccggcgggggcggcgtggggcccgggcccggtgcggcggggcccatgctgggcggcgtggtggagctcgccgctgcctcgtccttcccgctgctggagcagttcgcgggcgacggcttccacgcggacggcgacgacgtgctgacggtgaccgagaccagccgaggcctcaattttgagtacaagtgggaggcgggccgcggcgcggaggccttcccggccacgctgagccctggccgcaccgcacgcctgcaggagctgtgcgcccccgacggcgcgcccccgggcgtggttccggtgctcagcgcgcacagcccgtcgctgggcagcgagtacttcatccgcctagaggaggccgcacccgccgccggccacgaccctgactgcgccggctgcgcccccagtccacctgccaccgcggaccaggacgacgactctgacggcagcaccgccgcctcgctggccatggagccgctgctgggccacgggccacccgtcgacgtcccctggggccgcggcgaccactaccctcgcagaagcttggcgcgggacccgctctgcccctcacgctctccctcgccctcggcggggcccctgagtctggcggagggaggagcggaggatgcagactggggcgtggccgccttctgtcctgccttcttcgaggacccactgggcacgtcccctttggggagctcaggggcgcccccgctgccgctgactggcgaggatgagctagaggaggtgggagcgcggagggccgcccagcgcgggcactggcgctccaacgtgtcagccaacaacaacagcggcagccgctgtccagagtcctgggaccccgtctctgcgggcggccacgctgagggctgccccagtccaaagcagaccccacgggcctcccccgagccggggtaccctggagagcctctgcttgggctccaggcagcctctgcccaggagccaggctgctgccccggcctccctcatctatgctctgcccagggcctggcacctgctccctgcctggttacaccctcctggacagagacagccagtagtgggggtgaccacccgcaggcagagcccaagcttgccacggaggctgagggcactaccggaccccgcctgccccttccttccgtcccctccccatcccaggagggagccccacttccctcggaggaggccagtgcccccgacgcccctgatgccctgcctgactctcccacgcctgctactggtggcgaggtgtctgccatcaagctggcttctgccctgaatggcagcagcagctctcccgaggtggaggcacccagcagtgaggatgaggacacggccgaggccacctcaggcatcttcaccgacacgtccagcgacggcctgcaggccaggaggccggatgtggtgccagccttccgctctctgcagaagcaggtggggacccccgactccctggactccctggacatcccgtcctcagccagtgatggtggctatgaggtcttcagcccgtcggccactggcccctctggagggcagccgcgagcgctggacagtggctatgacaccgagaactatgagtcccctgagtttgtgctcaaggaggcgcaggaagggtgtgagccccaggcctttgcggagctggcctcagagggtgagggccccgggcccgagacacggctctccacctccctcagtggcctcaacgagaagaatccctaccgagactctgcctacttctcagacctcgaggctgaggccgaggccacctcaggcccagagaagaagtgcggcggggaccgagcccccgggccagagctgggcctgccgagcactgggcagccgtctgagcaggtctgtctcaggcctggggtttccggggaggcacaaggctctggccccggggaggtgctgcccccactgctgcagcttgaagggtcctccccagagcccagcacctgcccctcgggcctggtcccagagcctccggagccccaaggcccagccaaggtgcggcctgggcccagccccagctgctcccagtttttcctgctgaccccggttccgctgagatcagaaggcaacagctctgagttccaggggcccccaggactgttgtcagggccggccccacaaaagcggatggggggcccaggcacccccagagccccactccgcctggctctgcccggcctccctgcggccttggagggccggccggaggaggaggaggaggacagtgaggacagcgacgagtctgacgaggagctccgctgctacagcgtccaggagcctagcgaggacagcgaagaggaggcgccggcggtgcccgtggtggtggctgagagccagagcgcgcgcaacctgcgcagcctgctcaagatgcccagcctgctgtccgagaccttctgcgaggacctggaacgcaagaagaaggccgtgtccttcttcgacgacgtcaccgtctacctctttgaccaggaaagccccacccgggagctcggggagcccttcccgggcgccaaggaatcgccccctacgtcccttagggggagccccggctctcccagcgcccccaaccggccgcagcaggctgatggctccccaaatggctccacagcggaagagggtggtgggttcgcgtgggacgacgacttcccgctgatgacggccaaggcagccttcgccatggccctagacccggccgcacccgccccggctgcgcccacgcccacgcccgctcccttctcgcgcttcacggtgtcgcccgcgcccacgtcccgcttctccatcacgcacgtgtctgactcggacgccgagtccaagagaggacctgaagctggtgccgggggtgagagtaaagaggcttga

SEQ ID NO: 670 - DNA, 3816 bp, Homo sapiens
atggccaagcagcctgggcgctcagtgcagctcctcaagtccacagacgtgggccggcacagcctcctgtacctgaaggaaatcggccgtggctggttcgggaaggtgttcctgggggaggtgaactctggcatcagcagtgcccaggtggtggtgaaggagctgcaggctagtgccagcgtgcaggagcagatgcagttcctggaggaggtgcagccctacagggccctgaagcacagcaacctgctccagtgcctggcccagtgcgccgaggtgacgccctacctgctggtgatggagttctgcccactgggggacctcaagggctacctgcggagctgccgggtggcggagtccatggctcccgacccccggaccctgcagcgcatggcctgtgaggtggcctgtggcgtcctgcaccttcatcgcaacaatttcgtgcacagcgacctggccctgcggaactgcctgctcacggctgacctgacggtgaagattggtgactatggcctggctcactgcaagtacagagaggactacttcgtgactgccgaccagctgtgggtgcctctgcgctggatcgcgccagagctggtggacgaggtgcatagcaacctgctcgtcgtggaccagaccaagagcgggaatgtgtggtccctgggcgtgaccatctgggagctctttgagctgggcacgcagccctatccccagcactcggaccagcaggtgctggcgtacacggtccgggagcagcagctcaagctgcccaagccccagctgcagctgaccctgtcggaccgctggtacgaggtgatgcagttctgctggctgcagcccgagcagcggcccacagccgaggaggtgcacctgctgctgtcctacctgtgtgccaagggcgccaccgaagcagaggaggagtttgaacggcgctggcgctctctgcggcccggcgggggcggcgtggggcccgggcccggtgcggcggggcccatgctgggcggcgtggtggagctcgccgctgcctcgtccttcccgctgctggagcagttcgcgggcgacggcttccacgcggacggcgacgacgtgctgacggtgaccgagaccagccgaggcctcaattttgagtacaagtgggaggcgggccgcggcgcggaggccttcccggccacgctgagccctggccgcaccgcacgcctgcaggagctgtgcgcccccgacggcgcgcccccgggcgtggttccggtgctcagcgcgcacagcccgtcgctgggcagcgagtacttcatccgcctagaggaggccgcacccgccgccggccacgaccctgactgcgccggctgcgcccccagtccacctgccaccgcggaccaggacgacgactctgacggcagcaccgccgcctcgctggccatggagccgctgctgggccacgggccacccgtcgacgtcccctggggccgcggcgaccactaccctcgcagaagcttggcgcgggacccgctctgcccctcacgctctccctcgccctcggcggggcccctgagtctggcggagggaggagcggaggatgcagactggggcgtggccgccttctgtcctgccttcttcgaggacccactgggcacgtcccctttggggagctcaggggcgcccccgctgccgctgactggcgaggatgagctagaggaggtgggagcgcggagggccgcccagcgcgggcactggcgctccaacgtgtcagccaacaacaacagcggcagccgctgtccagagtcctgggaccccgtctctgcgggcggccacgctgagggctgccccagtccaaagcagaccccacgggcctcccccgagccggggtaccctggagagcctctgcttgggctccaggcagcctctgcccaggagccaggctgctgccccggcctccctcatctatgctctgcccagggcctggcacctgctccctgcctggttacaccctcctggacagagacagccagtagtgggggtgaccacccgcaggcagagcccaagcttgccacggaggctgagggcactaccggaccccgcctgccccttccttccgtcccctccccatcccaggagggagccccacttccctcggaggaggccagtgcccccgacgcccctgatgccctgcctgactctcccacgcctgctactggtggcgaggtgtctgccatcaagctggcttctgccctgaatggcagcagcagctctcccgaggtggaggcacccagcagtgaggatgaggacacggccgaggccacctcaggcatcttcaccgacacgtccagcgacggcctgcaggccaggaggccggatgtggtgccagccttccgctctctgcagaagcaggtggggacccccgactccctggactccctggacatcccgtcctcagccagtgatggtggctatgaggtcttcagcccgtcggccactggcccctctggagggcagccgcgagcgctggacagtggctatgacaccgagaactatgagtcccctgagtttgtgctcaaggaggcgcaggaagggtgtgagccccaggcctttgcggagctggcctcagagggtgagggccccgggcccgagacacggctctccacctccctcagtggcctcaacgagaagaatccctaccgagactctgcctacttctcagacctcgaggctgaggccgaggccacctcaggcccagagaagaagtgcggcggggaccgagcccccgggccagagctgggcctgccgagcactgggcagccgtctgagcaggtctgtctcaggcctggggtttccggggaggcacaaggctctggccccggggaggtgctgcccccactgctgcagcttgaagggtcctccccagagcccagcacctgcccctcgggcctggtcccagagcctccggagccccaaggcccagccaaggtgcggcctgggcccagccccagctgctcccagtttttcctgctgaccccggttccgctgagatcagaaggcaacagctctgagttccaggggcccccaggactgttgtcagggccggccccacaaaagcggatggggggcccaggcacccccagagccccactccgcctggctctgcccggcctccctgcggccttggagggccggccggaggaggaggaggaggacagtgaggacagcgacgagtctgacgaggagctccgctgctacagcgtccaggagcctagcgaggacagcgaagaggaggcgccggcggtgcccgtggtggtggctgagagccagagcgcgcgcaacctgcgcagcctgctcaagatgcccagcctgctgtccgagaccttctgcgaggacctggaacgcaagaagaaggccgtgtccttcttcgacgacgtcaccgtctacctctttgaccaggaaagccccacccgggagctcggggagcccttcccgggcgccaaggaatcgccccctacgttccttagggggagccccggctctcccagcgcccccaaccggccgcagcaggctgatggctccccaaatggctccacagcggaagagggtggtgggttcgcgtgggacgacgacttcccgctgatgacggccaaggcagccttcgccatggccctagacccggccgcacccgccccggctgcgcccacgcccatgcccgctcccttctcgcgcttcacggtgtcgcccgcgcccacgtcccgcttctccatcacgcacgtgtctgactcggacgccgagtccaagagaggacctgaagctggtgccgggggtgagagtaaagaggcttga

SEQ ID NO: 671 - DNA, 3450 bp, Homo sapiens
atggggcagcagcctggaaaagtacttggggaccaaagaaggccaagcttgcctgccctgcattttatcaaaggagcagggaagaaggaatcatcgaggcatgggggtccacactgcaatgtttttgtggaacatgaagcccttcagcggccagtagcatctgactttgagcctcagggtctgagtgaagccgctcgttggaactccaaggaaaaccttctcgctggacccagtgaaaatgaccccaaccttttcgttgcactgtatgattttgtggccagtggagataacactctaagcataactaaaggtgaaaagctccgggtcttaggctataatcacaatggggaatggtgtgaagcccaaaccaaaaatggccaaggctgggtcccaagcaactacatcacgccagtcaacagtctggagaaacactcctggtaccatgggcctgtgtcccgcaatgccgctgagtatctgctgagcagcgggatcaatggcagcttcttggtgcgtgagagtgagagcagtcctggccagaggtccatctcgctgagatacgaagggagggtgtaccattacaggatcaacactgcttctgatggcaagctctacgtctcctccgagagccgcttcaacaccctggccgagttggttcatcatcattcaacggtggccgacgggctcatcaccacgctccattatccagccccaaagcgcaacaagcccactgtctatggtgtgtcccccaactacgacaagtgggagatggaacgcacggacatcaccatgaagcacaagctgggcgggggccagtacggggaggtgtacgagggcgtgtggaagaaatacagcctgacggtggccgtgaagaccttgaaggaggacaccatggaggtggaagagttcttgaaagaagctgcagtcatgaaagagatcaaacaccctaacctggtgcagctccttggggtctgcacccgggagcccccgttctatatcatcactgagttcatgacctacgggaacctcctggactacctgagggagtgcaaccggcaggaggtgaacgccgtggtgctgctgtacatggccactcagatctcgtcagccatggagtacctggagaagaaaaacttcatccacagagatcttgctgcccgaaactgcctggtaggggagaaccacttggtgaaggtagctgattttggcctgagcaggttgatgacaggggacacctacacagcccatgctggagccaagttccccatcaaatggactgcacccgagagcctggcctacaacaagttctccatcaagtccgacgtctgggcatttggagtattgctttgggaaattgctacctatggcatgtccccttacccgggaattgacctgtcccaggtgtatgagctgctagagaaggactaccgcatggagcgcccagaaggctgcccagagaaggtctatgaactcatgcgagcatgttggcagtggaatccctctgaccggccctcctttgctgaaatccaccaagcctttgaaacaatgttccaggaatccagtatctcagacgaagtggaaaaggagctggggaaacaaggcgtccgtggggctgtgagtaccttgctgcaggccccagagctgcccaccaagacgaggacctccaggagagctgcagagcacagagacaccactgacgtgcctgagatgcctcactccaagggccagggagagagcgatcctctggaccatgagcctgccgtgtctccattgctccctcgaaaagagcgaggtcccccggagggcggcctgaatgaagatgagcgccttctccccaaagacaaaaagaccaacttgttcagcgccttgatcaagaagaagaagaagacagccccaacccctcccaaacgcagcagctccttccgggagatggacggccagccggagcgcagaggggccggcgaggaagagggccgagacatcagcaacggggcactggctttcacccccttggacacagctgacccagccaagtccccaaagcccagcaatggggctggggtccccaatggagccctccgggagtccgggggctcaggcttccggtctccccacctgtggaagaagtccagcacgctgaccagcagccgcctagccaccggcgaggaggagggcggtggcagctccagcaagcgcttcctgcgctcttgctccgcctcctgcgttccccatggggccaaggacacggagtggaggtcagtcacgctgcctcgggacttgcagtccacgggaagacagtttgactcgtccacatttggagggcacaaaagtgagaagccggctctgcctcggaagagggcaggggagaacaggtctgaccaggtgacccgaggcacagtaacgcctccccccaggctggtgaaaaagaatgaggaagctgctgatgaggtcttcaaagacatcatggagtccagcccgggctccagcctgcccaacctgactccaaaacccctccggcggcaggtcaccgtggcccctgcctcgggcctcccccacaaggaagaagctggaaagggcagtgccttagggacccctgctgcagctgagccagtgacccccaccagcaaagcaggctcaggtgcaccagggggcaccagcaagggccccgccgaggagtccagagtgaggaggcacaagcactcctctgagtcgccagggagggacaaggggaaattgtccaggctcaaacctgccccgccgcccccaccagcagcctctgcagggaaggctggaggaaagccctcgcagagcccgagccaggaggcggccggggaggcagtcctgggcgcaaagacaaaagccacgagtctggttgatgctgtgaacagtgacgctgccaagcccagccagccgggagagggcctcaaaaagcccgtgctcccggccactccaaagccacagtccgccaagccgtcggggacccccatcagcccagcccccgttccctccacgttgccatcagcatcctcggccctggcaggggaccagccgtcttccaccgccttcatccctctcatatcaacccgagtgtctcttcggaaaacccgccagcctccagagcggatcgccagcggcgccatcaccaagggcgtggtcctggacagcaccgaggcgctgtgcctcgccatctctaggaactccgagcagatggccagccacagcgcagtgctggaggccggcaaaaacctctacacgttctgcgtgagctatgtggattccatccagcaaatgaggaacaagtttgccttccgagaggccatcaacaaactggagaataatctccgggagcttcagatctgcccggcgacagcaggcagtggtccagcggccactcaggacttcagcaagctcctcagttcggtgaaggaaatcagtgacatagtgcagaggtag

SEQ ID NO: 672 - DNA, 3450 bp, Homo sapiens
atggggcagcagcctggaaaagtacttggggaccaaagaaggccaagcttgcctgccctgcattttatcaaaggagcagggaagaaggaatcatcgaggcatgggggtccacactgcaatgtttttgtggaacatgaagcccttcagcggccagtagcatctgactttgagcctcagggtctgagtgaagccgctcgttggaactccaaggaaaaccttctcgctggacccagtgaaaatgaccccaaccttttcgttgcactgtatgattttgtggccagtggagataacactctaagcataactaaaggtgaaaagctccgggtcttaggctataatcacaatggggaatggtgtgaagcccaaaccaaaaatggccaaggctgggtcccaagcaactacatcacgccagtcaacagtctggagaaacactcctggtaccatgggcctgtgtcccgcaatgccgctgagtatctgctgagcagcgggatcaatggcagcttcttggtgcgtgagagtgagagcagtcctggccagaggtccatctcgctgagatacgaagggagggtgtaccattacaggatcaacactgcttctgatggcaagctctacgtctcctccgagagccgcttcaacaccctggccgagttggttcatcatcattcaacggtggccgacgggctcatcaccacgctccattatccagccccaaagcgcaacaagcccactgtctatggtgtgtcccccaactacgacaagtgggagatggaacgcacggacatcaccatgaagcacaagctgggcgggggccagtacggggaggtgtacgagggcgtgtggaagaaatacagcctgacggtggccgtgaagaccttgaaggaggacaccatggaggtggaagagttcttgaaagaagctgcagtcatgaaagagatcaaacaccctaacctggtgcagctccttggggtctgcacccgggagcccccgttctatatcatcactgagttcatgacctacgggaacctcctggactacctgagggagtgcaaccggcaggaggtgaacgccgtggtgctgctgtacatggccactcagatctcgtcagccatggagtacctggagaagaaaaacttcatccacagagatcttgctgcccgaaactgcctggtaggggagaaccacttggtgaaggtagctgattttggcctgagcaggttgatgacaggggacacctacacagcccatgctggagccaagttccccatcaaatggactgcacccgagagcctggcctacaacaagttctccatcaagtccgacgtctgggcatttggagtattgctttgggaaattgctacctatggcatgtccccttacccgggaattgacctgtcccaggtgtatgagctgctagagaaggactaccgcatggagcgcccagaaggctgcccagagaaggtctatgaactcatgcgagcatgttggcagtggaatccctctgaccggccctcctttgctgaaatccaccaagcctttgaaacaatgttccaggaatccagtatctcagacgaagtggaaaaggagctggggaaacaaggcgtccgtggggctgtgagtaccttgctgcaggccccagagctgcccaccaagacgaggacctccaggagagctgcagagcacagagacaccactgacgtgcctgagatgcctcactccaagggccagggagagagcgatcctctggaccatgagcctgccgtgtctccattgctccctcgaaaagagcgaggtcccccggagggcggcctgaatgaagatgagcgccttctccccaaagacaaaaagaccaacttgttcagcgccttgatcaagaagaagaagaagacagccccaacccctcccaaacgcagcagctccttccgggagatggacggccagccggagcgcagaggggccggcgaggaagagggccgagacatcagcaacggggcactggctttcacccccttggacacagctgacccagccaagtccccaaagcccagcaatggggctggggtccccaatggagccctccgggagtccgggggctcaggcttccggtctccccacctgtggaagaagtccagcacgctgaccagcagccgcctagccaccggcgaggaggagggcggtggcagctccagcaagcgcttcctgcgctcttgctccgcctcctgcgttccccatggggccaaggacacggagtggaggtcagtcacgctgcctcgggacttgcagtccacgggaagacagtttgactcgtccacatttggagggcacaaaagtgagaagccggctctgcctcggaagagggcaggggagaacaggtctgaccaggtgacccgaggcacagtaacgcctccccccaggctggtgaaaaagaatgaggaagctgctgatgaggtcttcaaagacatcatggagtccagcccgggctccagcccgcccaacctgactccaaaacccctccggcggcaggtcaccgtggcccctgcctcgggcctcccccacaaggaagaagctggaaagggcagtgccttagggacccctgctgcagctgagccagtgacccccaccagcaaagcaggctcaggtgcaccagggggcaccagcaagggccccgccgaggagtccagagtgaggaggcacaagcactcctctgagtcgccagggagggacaaggggaaattgtccaggctcaaacctgccccgccgcccccaccagcagcctctgcagggaaggctggaggaaagccctcgcagagcccgagccaggaggcggccggggaggcagtcctgggcgcaaagacaaaagccacgagtctggttgatgctgtgaacagtgacgctgccaagcccagccagccgggagagggcctcaaaaagcccgtgctcccggccactccaaagccacagtccgccaagccgttggggacccccatcagcccagcccccgttccctccacgttgccatcagcatcctcggccctggcaggggaccagccgtcttccaccgccttcatccctctcatatcaacccgagtgtctcttcggaaaacccgccagcctccagagcggatcgccagcggcgccatcaccaagggcgtggtcctggacagcaccgaggcgctgtgcctcgccatctctaggaactccgagcagatggccagccacagcgcagtgctggaggccggcaaaaacctctacacgttctgcgtgagctatgtggattccatccagcaaatgaggaacaagtttgccttccgagaggccatcaacaaactggagaataatctccgggagcttcagatctgcccggcgacagcaggcagtggtccagcggccactcaggacttcagcaagctcctcagttcggtgaaggaaatcagtgacatagtgcagaggtag

SEQ ID NO: 673 - DNA, 3117 bp, Homo sapiens
atgcagccagaggagggcacaggctggctgctggagctgctgtccgaggtgcagctgcaacagtacttcctgcggctccgagatgacctcaacgtcacccgcctgtcccactttgagtacgtcaagaatgaggacctggagaagatcggcatgggtcggcctggccagcggcggctgtgggaggctgtgaagaggaggaaggccttgtgcaaacgcaagtcgtggatgagtaaggtgttcagtggaaagcgactggaggctgagttcccacctcatcactctcagagcaccttccggaagacctcgcccgcccctgggggcccagcaggggaggggcccctgcagagcctcacctgcctcattggggagaaggacctgcgcctcctggagaagctgggtgatggttcctttggcgtggtgcgcaggggcgagtgggacgcgccctcagggaagacggtgagtgtggctgtgaagtgcctgaagcccgatgtcctgagccagccagaagccatggacgacttcatccgggaggtcaatgccatgcactcgctcgaccaccgaaacctcatccgcctctacggggtggtgctcacgccgcccatgaagatggtgacagagctggcacctctgggatcgttgttggaccggctacgtaagcaccagggccacttcctcctggggactctgagccgctacgctgtgcaggtggctgagggcatgggctacctggagtccaagcgctttattcaccgtgacctggctgcccgcaatctgctgttggctacccgcgacctggtcaagatcggggactttgggctgatgcgagcactacctcagaatgacgaccattacgtcatgcaggaacatcgcaaggtgcccttcgcctggtgtgcccccgagagcctgaagacacgcaccttctcccatgccagcgacacctggatgttcggggtgacactgtgggaaatgttcacctacggccaggagccctggatcggcctcaacggcagtcagatcctgcataagatcgacaaggagggggagcggctgccccggcccgaggactgtccccaggacatctacaacgtcatggtccagtgctgggctcacaagccagaggacagacccacgtttgtggccctgcgggacttcctgctggaggcccagcccacagacatgcgggcccttcaggactttgaggaaccggacaagctgcacatccagatgaatgatgtcatcaccgtcatcgagggaagggccgagaactactggtggcgtggccagaacacacggacgctgtgtgtggggcccttccctcgcaacgtggtgacctccgtggccggcctgtcggcccaggacatcagccagcccctgcagaacagcttcatccacacagggcatggcgacagtgacccccgccactgctggggcttcccggacaggattgacgaactgtatctgggaaaccccatggacccccccgacctcctgagcgtggaactgagcacctcccggcccccccagcatctaggaggggtgaaaaaaccaacctatgaccctgtgagcgaggaccaagaccccttgtccagcgacttcaagaggctgggcctgcggaagccaggcctgccccgagggctgtggctggcgaagccctcggcgcgggtgccgggcaccaaggccagccgaggcagcggggctgaggtcacgctcatcgacttcggtgaggagcccgtggtcccggccctacggccctgcgcgccctccctggcgcagctggccatggacgcctgctccctgctggacgagaccccgcctcagagccccacgcgggcactgccccggcccctgcaccccacgcctgtggtggactgggacgcacgcccgctgccccccccgcccgcctatgacgacgtggcccaggatgaggatgactttgagatctgctccatcaacagcaccctcgtgggcgcgggggtccctgccgggcccagccagggccagaccaactacgcctttgtgcctgagcaggcgcggccgccccctcccctggaggacaacctgttcctcccgccccagggtgggggcaagccgcccagctccgcacagaccgcagagatcttccaggcgctacagcaggagtgcatgaggcaactgcaggctccggccggctccctggccccctctcccagcccggggggtgacgacaagccccaggtgcctcctcgggtacccatcccccctcggcccacgcgcccacacgtccagctgtctccagcccccccgggcgaggaggagaccagccagtggcctggacctgcttcccctccccgggtgcctccgcgggagcccctgtcccctcaaggctcgaggacacccagccccctggtaccacctggcagctccccgctgccaccccggctctcaagctcacctgggaagaccatgcccaccacccagagctttgcctcagaccccaagtacgccaccccccaggtgatccaggcccctggcccgcgggctggtccctgcatcctgcccatcgtccgggatggcaagaaggtcagcagcacccactattacttgctgcccgagcgaccatcctacctggagcgctaccagcgcttcctgcgtgaggcccagagccccgaggagcctacccccctgcctgtgcctctgctgctgcccccacccagcaccccagcccccgccgcccccacggccaccgtgcggccgatgccccaggctgccttggaccccaaggccaacttctccaccaacaacagcaacccaggggcccggccaccacccccgagggccactgctcggctgccacagaggggctgccctggcgatgggccagaggcgggccggccagcagacaagatccagatggccatggtgcatggggtgaccacagaggagtgccaggcggccctgcagtgccacggctggagcgtgcagagggctgcccagtatctgaaggtggagcagctcttcgggctgggtctgcggcccagaggggagtgccacaaagtgctggagatgttcgactggaacctggagcaggccggctgccaccttctgggctcctggggccctgcccaccacaagcgctga

SEQ ID NO: 674 - DNA, 3117 bp, Homo sapiens
atgcagccagaggagggcacaggctggctgctggagctgctgtccgaggtgcagctgcaacagtacttcctgcggctccgagatgacctcaacgtcacccgcctgtcccactttgagtacgtcaagaatgaggacctggagaagatcggcatgggtcggcctggccagcggcggctgtgggaggctgtgaagaggaggaaggccttgtgcaaacgcaagtcgtggatgagtaaggtgttcagtggaaagcgactggaggctgagttcccacctcatcactctcagagcaccttccggaagacctcgcccgcccctgggggcccagcaggggaggggcccctgcagagcctcacctgcctcattggggagaaggacctgcgcctcctggagaagctgggtgatggttcctttggcgtggtgcgcaggggcgagtgggacgcgccctcagggaagacggtgagtgtggctgtgaagtgcctgaagcccgatgtcctgagccagccagaagccatggacgacttcatccgggaggtcaatgccatgcactcgctcgaccaccgaaacctcatccgcctctacggggtggtgctcacgccgcccatgaagatggtgacagagctggcacctctgggatcgttgttggaccggctacgtaagcaccagggccacttcctcctggggactctgagccgctacgctgtgcaggtggctgagggcatgggctacctggagtccaagcgctttattcaccgtgacctggctgcccgcaatctgctgttggctacccgcgacctggtcaagatcggggactttgggctgatgcgagcactacctcagaatgacgaccattacgtcatgcaggaacatcgcaaggtgcccttcgcctggtgtgcccccgagagcctgaagacacgcaccttctcccatgccagcgacacctggatgttcggggtgacactgtgggaaatgttcacctacggccaggagccctggatcggcctcaacggcagtcagatcctgcataagatcgacaaggagggggagcggctgccccggcccgaggactgtccccaggacatctacaacgtcatggtccagtgctgggctcacaagccagaggacagacccacgtttgtggccctgcgggacttcctgctggaggcccagcccacagacatgcgggcccttcaggactttgaggaaccggacaagctgcacatccagatgaatgatgtcatcaccgtcatcgagggaagggccgagaactactggtggcgtggccagaacacacggacgctgtgtgtggggcccttccctcgcaacgtggtgacctccgtggccggcctgtcggcccaggacatcagccagcccctgcagaacagcttcatccacacagggcatggcgacagtgacccccgccactgctggggcttcccggacaggattgacgaactgtatctgggaaaccccatggacccccccgacctcctgagcgtggaactgagcacctcccggcccccccagcatctaggaggggtgaaaaaaccaacctatgaccctgtgagcgaggaccaagaccccttgtccagcgacttcaagaggctgggcctgcggaagccaggcctgccccgagggctgtggctggcgaagccctcggcgcgggtgccgggcaccaaggccagccgaggcagcggggctgaggtcacgctcatcgacttcggtgaggagcccgtggtcccggccctacggccctgcgcgccctccctggcgcagctggccatggacgcctgctccctgctggacgagaccccgcctcagagccccacgcgggcactgccccggcccctgcaccccacgcctgtggtggactgggacgcacgcccgctgccccccccgcccgcctatgacgacgtggcccaggatgaggatgactttgagatctgctccatcaacagcaccctcgtgggcgcgggggtccctgccgggcccagccagggccagaccaactacgcctttgtgcctgagcaggcgcggccgccccctcccctggaggacaacctgttcctcccgccccagggtgggggcaagccgcccagctccgcacagaccgcagagatcttccaggcgctacagcaggagtgcatgaggcaactgcaggctccggccggctccccggccccctctcccagcccggggggtgacgacaagccccaggtgcctcctcgggtacccatcccccctcggcccacgcgcccacacgtccagctgtctccagcccccccgggcgaggaggagaccagccagtggcctggacctgcttcccctccccgggtgcctccgcgggagcccctgtcccctcaaggctcgaggacacccagccccctggtaccacctggcagctccccgctgccaccccggctctcaagctcacctgggaagaccatgcccaccacccagagctttgcctcagaccccaagtacgccaccccccaggtgatccaggcccctggcccgcgggctggtccctgcatcctgcccatcgtccgggatggcaagaaggtcagcagcacccactattacttgctgcccgagcgaccatcctacctggagcgctaccagcgcttcctgcgtgaggcccagagccccgaggagcctacccccctgcctgtgcctctgctgctgcccccacccagcaccccagcccccgccgcccccacggccaccgtgcggccgatgccccaggctgccttggaccccaaggccaacttctccaccaacaacagcaacccaggggcccggccaccacccccgagggccactgctcggctgccacagaggggctgccctggcgatgggccagaggcgggccggccagcagacaagatccagatggccatggtgcatggggtgaccacagaggagtgccaggcggccctgcagtgccacggctggagcgtgcagagggctgcccagtatctgaaggtggagcagctcttcgggctgggtctgcggcccagaggggagtgccacaaagtgctggagatgttcgactggaacctggagcaggccggctgccaccttctgggctcctggggccctgcccaccacaagcactga

SEQ ID NO: 675 - DNA, 4863 bp, Homo sapiens
atgggagccatcgggctcctgtggctcctgccgctgctgctttccacggcagctgtgggctccgggatggggaccggccagcgcgcgggctccccagctgcggggccgccgctgcagccccgggagccactcagctactcgcgcctgcagaggaagagtctggcagttgacttcgtggtgccctcgctcttccgtgtctacgcccgggacctactgctgccaccatcctcctcggagctgaaggctggcaggcccgaggcccgcggctcgctagctctggactgcgccccgctgctcaggttgctggggccggcgccgggggtctcctggaccgccggttcaccagccccggcagaggcccggacgctgtccagggtgctgaagggcggctccgtgcgcaagctccggcgtgccaagcagttggtgctggagctgggcgaggaggcgatcttggagggttgcgtcgggccccccggggaggcggctgtggggctgctccagttcaatctcagcgagctgttcagttggtggattcgccaaggcgaagggcgactgaggatccgcctgatgcccgagaagaaggcgtcggaagtgggcagagagggaaggctgtccgcggcaattcgcgcctcccagccccgccttctcttccagatcttcgggactggtcatagctccttggaatcaccaacaaacatgccttctccttctcctgattattttacatggaatctcacctggataatgaaagactccttccctttcctgtctcatcgcagccgatatggtctggagtgcagctttgacttcccctgtgagctggagtattcccctccactgcatgacctcaggaaccagagctggtcctggcgccgcatcccctccgaggaggcctcccagatggacttgctggatgggcctggggcagagcgttctaaggagatgcccagaggctcctttctccttctcaacacctcagctgactccaagcacaccatcctgagtccgtggatgaggagcagcagtgagcactgcacactggccgtctcggtgcacaggcacctgcagccctctggaaggtacattgcccagctgctgccccacaacgaggctgcaagagagatcctcctgatgcccactccagggaagcatggttggacagtgctccagggaagaatcgggcgtccagacaacccatttcgagtggccctggaatacatctccagtggaaaccgcagcttgtctgcagtggacttctttgccctgaagaactgcagtgaaggaacatccccaggctccaagatggccctgcagagctccttcacttgttggaatgggacagtcctccagcttgggcaggcctgtgacttccaccaggactgtgcccagggagaagatgagagccagatgtgccggaaactgcctgtgggtttttactgcaactttgaagatggcttctgtggctggacccaaggcacactgtcaccccacactcctcaatggcaggtcaggaccctaaaggatgcccggttccaggaccaccaagaccatgctctattgctcagtaccactgatgtccccgcttctgaaagtgctacagtgaccagtgctacgtttcctgcaccgatcaagagctctccatgtgagctccgaatgtcctggctcattcgtggagtcttgaggggaaacgtgtccttggtgctagtggagaacaaaaccgggaaggagcaaggcaggatggtctggcatgtcgccgcctatgaaggcttgagcctgtggcagtggatggtgttgcctctcctcgatgtgtctgacaggttctggctgcagatggtcgcatggtggggacaaggatccagagccatcgtggcttttgacaatatctccatcagcctggactgctacctcaccattagcggagaggacaagatcctgcagaatacagcacccaaatcaagaaacctgtttgagagaaacccaaacaaggagctgaaacccggggaaaattcaccaagacagacccccatctttgaccctacagttcattggctgttcaccacatgtggggccagcgggccccatggccccacccaggcacagtgcaacaacgcctaccagaactccaacctgagcgtggaggtggggagcgagggccccctgaaaggcatccagatctggaaggtgccagccaccgacacctacagcatctcgggctacggagctgctggcgggaaaggcgggaagaacaccatgatgcggtcccacggcgtgtctgtgctgggcatcttcaacctggagaaggatgacatgctgtacatcctggttgggcagcagggagaggacgcctgccccagtacaaaccagttaatccagaaagtctgcattggagagaacaatgtgatagaagaagaaatccgtgtgaacagaagcgtgcatgagtgggcaggaggcggaggaggagggggtggagccacctacgtatttaagatgaaggatggagtgccggtgcccctgatcattgcagccggaggtggtggcagggcctacggggccaagacagacacgttccacccagagagactggagaataactcctcggttctagggctaaacggcaattccggagccgcaggtggtggaggtggctggaatgataacacttccttgctctgggccggaaaatctttgcaggagggtgccaccggaggacattcctgcccccaggccatgaagaagtgggggtgggagacaagagggggtttcggagggggtggaggggggtgctcctcaggtggaggaggcggaggatatataggcggcaatgcagcctcaaacaatgaccccgaaatggatggggaagatggggtttccttcatcagtccactgggcatcctgtacaccccagctttaaaagtgatggaaggccacggggaagtgaatattaagcattatctaaactgcagtcactgtgaggtagacgaatgtcacatggaccctgaaagccacaaggtcatctgcttctgtgaccacgggacggtgctggctgaggatggcgtctcctgcattgtgtcacccaccccggagccacacctgccactctcgctgatcctctctgtggtgacctctgccctcgtggccgccctggtcctggctttctccggcatcatgattgtgtaccgccggaagcaccaggagctgcaagccatgcagatggagctgcagagccctgagtacaagctgagcaagctccgcacctcgaccatcatgaccgactacaaccccaactactgctttgctggcaagacctcctccatcagtgacctgaaggaggtgccgcggaaaaacatcaccctcattcggggtctgggccatggcgcctttggggaggtgtatgaaggccaggtgtccggaatgcccaacgacccaagccccctgcaagtggctgtgaagacgctgcctgaagtgtgctctgaacaggacgaactggatttcctcatggaagccctgatcatcagcaaattcaaccaccagaacattgttcgctgcattggggtgagcctgcaatccctgccccggttcatcctgctggagctcatggcggggggagacctcaagtccttcctccgagagacccgccctcgcccgagccagccctcctccctggccatgctggaccttctgcacgtggctcgggacattgcctgtggctgtcagtatttggaggaaaaccacttcatccaccgagacattgctgccagaaactgcctcttgacctgtccaggccctggaagagtggccaagattggagacttcgggatggcccgagacatctacagggcgagctactatagaaagggaggctgtgccatgctgccagttaagtggatgcccccagaggccttcatggaaggaatattcacttctaaaacagacacatggtcctttggagtgctgctatgggaaatcttttctcttggatatatgccataccccagcaaaagcaaccaggaagttctggagtttgtcaccagtggaggccggatggacccacccaagaactgccctgggcctgtataccggataatgactcagtgctggcaacatcagcctgaagacaggcccaactttgccatcattttggagaggattgaatactgcacccaggacccggatgtaatcaacaccgctttgccgatagaatatggtccacttgtggaagaggaagagaaagtgcctgtgaggcccaaggaccctgagggggttcctcctctcctggtctctcaacaggcaaaacgggaggaggagcgcagcccagctgccccaccacctctgcctaccacctcctctggcaaggctgcaaagaaacccacagctgcagagatctctgttcgagtccctagagggccggccgtggaagggggacacgtgaatatggcattctctcagtccaaccctccttcggagttgcacagggtccacggatccagaaacaagcccaccagcttgtggaacccaacgtacggctcctggtttacagagaaacccaccaaaaagaataatcctatagcaaagaaggagccacacgacaggggtaacctggggctggagggaagctgtactgtcccacctaacgttgcaactgggagacttccgggggcctcactgctcctagagccctcttcgctgactgccaatatgaaggaggtacctctgttcaggctacgtcacttcccttgtgggaatgtcaattacggctaccagcaacagggcttgcccttagaagccgctactgcccctggagctggtcattacgaggataccattctgaaaagcaagaatagcatgaaccagcctgggccctga

SEQ ID NO: 676 - DNA, 4863 bp, Homo sapiens
atgggagccatcgggctcctgtggctcctgccgctgctgctttccacggcagctgtgggctccgggatggggaccggccagcgcgcgggctccccagctgcggggccgccgctgcagccccgggagccactcagctactcgcgcctgcagaggaagagtctggcagttgacttcgtggtgccctcgctcttccgtgtctacgcccgggacctactgctgccaccatcctcctcggagctgaaggctggcaggcccgaggcccgcggctcgctagctctggactgcgccccgctgctcaggttgctggggccggcgccgggggtctcctggaccgccggttcaccagccccggcagaggcccggacgctgtccagggtgctgaagggcggctccgtgcgcaagctccggcgtgccaagcagttggtgctggagctgggcgaggaggcgatcttggagggttgcgtcgggccccccggggaggcggctgtggggctgctccagttcaatctcagcgagctgttcagttggtggattcgccaaggcgaagggcgactgaggatccgcctgatgcccgagaagaaggcgtcggaagtgggcagagagggaaggctgtccgcggcaattcgcgcctcccagccccgccttctcttccagatcttcgggactggtcatagctccttggaatcaccaacaaacatgccttctccttctcctgattattttacatggaatctcacctggataatgaaagactccttccctttcctgtctcatcgcagccgatatggtctggagtgcagctttgacttcccctgtgagctggagtattcccctccactgcatgacctcaggaaccagagctggtcctggcgccgcatcccctccgaggaggcctcccagatggacttgctggatgggcctggggcagagcgttctaaggagatgcccagaggctcctttctccttctcaacacctcagctgactccaagcacaccatcctgagtccgtggatgaggagcagcagtgagcactgcacactggccgtctcggtgcacaggcacctgcagccctctggaaggtacattgcccagctgctgccccacaacgaggctgcaagagagatcctcctgatgcccactccagggaagcatggttggacagtgctccagggaagaatcgggcgtccagacaacccatttcgagtggccctggaatacatctccagtggaaaccgcagcttgtctgcagtggacttctttgccctgaagaactgcagtgaaggaacatccccaggctccaagatggccctgcagagctccttcacttgttggaatgggacagtcctccagcttgggcaggcctgtgacttccaccaggactgtgcccagggagaagatgagagccagatgtgccggaaactgcctgtgggtttttactgcaactttgaagatggcttctgtggctggacccaaggcacactgtcaccccacactcctcaatggcaggtcaggaccctaaaggatgcccggttccaggaccaccaagaccatgctctattgctcagtaccactgatgtccccgcttctgaaagtgctacagtgaccagtgctacgtttcctgcaccgatcaagagctctccatgtgagctccgaatgtcctggctcattcgtggagtcttgaggggaaacgtgtccttggtgctagtggagaacaaaaccgggaaggagcaaggcaggatggtctggcatgtcgccgcctatgaaggcttgagcctgtggcagtggatggtgttgcctctcctcgatgtgtctgacaggttctggctgcagatggtcgcatggtggggacaaggatccagagccatcgtggcttttgacaatatctccatcagcctggactgctacctcaccattagcggagaggacaagatcctgcagaatacagcacccaaatcaagaaacctgtttgagagaaacccaaacaaggagctgaaacccggggaaaattcaccaagacagacccccatctttgaccctacagttcattggctgttcaccacatgtggggccagcgggccccatggccccacccaggcacagtgcaacaacgcctaccagaactccaacctgagcgtggaggtggggagcgagggccccctgaaaggcatccagatctggaaggtgccagccaccgacacctacagcatctcgggctacggagctgctggcgggaaaggcgggaagaacaccatgatgcggtcccacggcgtgtctgtgctgggcatcttcaacctggagaaggatgacatgctgtacatcctggttgggcagcagggagaggacgcctgccccagtacaaaccagttaatccagaaagtctgcattggagagaacaatgtgatagaagaagaaatccgtgtgaacagaagcgtgcatgagtgggcaggaggcggaggaggagggggtggagccacctacgtatttaagatgaaggatggagtgccggtgcccctgatcattgcagccggaggtggtggcagggcctacggggccaagacagacacgttccacccagagagactggagaataactcctcggttctagggctaaacggcaattccggagccgcaggtggtggaggtggctggaatgataacacttccttgctctgggccggaaaatctttgcaggagggtgccaccggaggacattcctgcccccaggccatgaagaagtgggggtgggagacaagagggggtttcggagggggtggaggggggtgctcctcaggtggaggaggcggaggatatataggcggcaatgcagcctcaaacaatgaccccgaaatggatggggaagatggggtttccttcatcagtccactgggcatcctgtacaccccagctttaaaagtgatggaaggccacggggaagtgaatattaagcattatctaaactgcagtcactgtgaggtagacgaatgtcacatggaccctgaaagccacaaggtcatctgcttctgtgaccacgggacggtgctggctgaggatggcgtctcctgcattgtgtcacccaccccggagccacacctgccactctcgctgatcctctctgtggtgacctctgccctcgtggccgccctggtcctggctttctccggcatcatgattgtgtaccgccggaagcaccaggagctgcaagccatgcagatggagctgcagagccctgagtacaagctgagcaagctccgcacctcgaccatcatgaccgactacaaccccaactactgctttgctggcaagacctcctccatcagtgacctgaaggaggtgccgcggaaaaacatcaccctcattcggggtctgggccatggcgcctttggggaggtgtatgaaggccaggtgtccggaatgcccaacgacccaagccccctgcaagtggctgtgaagacgctgcctgaagtgtgctctgaacaggacgaactggatttcctcatggaagccctgatcatcagcaaattcaaccaccagaacattgttcgctgcattggggtgagcctgcaatccctgccccggttcatcctgctggagctcatggcggggggagacctcaagtccttcctccgagagacccgccctcgcccgagccagccctcctccctggccatgctggaccttctgcacgtggctcgggacattgcctgtggctgtcagtatttggaggaaaaccacttcatccaccgagacattgctgccagaaactgcctcttgacctgtccaggccctggaagagtggccaagattggagacttcgggatggcccgagacatctacagggcgagctactatagaaagggaggctgtgccatgctgccagttaagtggatgcccccagaggccttcatggaaggaatattcacttctaaaacagacacatggtcctttggagtgctgctatgggaaatcttttctcttggatatatgccataccccagcaaaagcaaccaggaagttctggagtttgtcaccagtggaggccggatggacccacccaagaactgccctgggcctgtataccggataatgactcagtgctggcaacatcagcctgaagacaggcccaactttgccatcattttggagaggattgaatactgcacccaggacccggatgtaatcaacaccgctttgccgatagaatatggtccacttgtggaagaggaagagaaagtgcctgtgaggcccaaggaccctgagggggttcctcctctcctggtctctcaacaggcaaaacgggaggaggagcgcagcccagctgccccaccacctctgcctaccacctcctctggcaaggctgcaaagaaacccacagctgcagagatctctgttcgagtccctagagggccggccgtggaagggggacacgtgaatatggcattctctcagtccaaccctccttcggagttgcacaaggtccacggatccagaaacaagcccaccagcttgtggaacccaacgtacggctcctggtttacagagaaacccaccaaaaagaataatcctatagcaaagaaggagccacacgagaggggtaacctggggctggagggaagctgtactgtcccacctaacgttgcaactgggagacttccgggggcctcactgctcctagagccctcttcgctgactgccaatatgaaggaggtacctctgttcaggctacgtcacttcccttgtgggaatgtcaattacggctaccagcaacagggcttgcccttagaagccgctactgcccctggagctggtcattacgaggataccattctgaaaagcaagaatagcatgaaccagcctgggccctga

SEQ ID NO: 677 - DNA, 3549 bp, Homo sapiens
atggggcagcaggtgggccgcgtcggggaagctccggggctccagcagcctcagccccgcgggatccggggcagcagtgcagccaggccctccggccgcaggcgggacccggcggggcgcaccacagagaccggcttcaatatcttcacccagcatgatcactttgccagctgtgtggaggatggatttgagggagacaagactggaggcagtagtccagaagctttgcatcgtccctatggttgtgatgttgaaccccaggcactaaatgaggctatcaggtggagctccaaggagaacttgctcggagccactgagagtgaccctaatctcttcgttgcactttatgattttgtagcaagtggtgataacacactcagcatcactaaaggtgaaaagctacgagtccttggttacaaccagaatggtgagtggagtgaagttcgctctaagaatgggcagggctgggtgccaagcaactacatcaccccagtgaacagcctggaaaaacactcctggtaccatggacctgtgtcacgcagtgcagctgagtatctgctcagcagtctaatcaatggcagcttcctggtgcgagaaagtgagagtagccctgggcagctgtccatctcgctcaggtacgagggacgtgtgtatcactacaggatcaataccactgcagatggcaaggtgtatgtgactgctgagagccgcttcagcaccttggcagagcttgtacaccatcactccacagtggctgatgggctggtgacaacattacactacccagcacccaagtgtaataagcctacagtctatggtgtgtcccccatccacgacaaatgggaaatggagcgaacagatattaccatgaagcacaaacttgggggcggtcagtatggagaggtttacgttggcgtctggaagaaatacagccttacagttgctgtgaaaacattgaaggaagataccatggaggtagaagaattcctgaaagaagctgcagtaatgaaggaaatcaagcatcctaatctggtacaacttttaggtgtgtgtactttggagccaccattttacattgtgactgaatacatgccatacgggaatttgctggattacctccgagaatgcaaccgagaagaggtgactgcagttgtgctgctctacatggccactcagatttcttctgcaatggagtacttagagaagaagaatttcatccatagagatcttgcagctcgtaactgcctagtgggagaaaaccatgtggtaaaagtggctgactttggcttaagtagattgatgactggagacacttatactgctcatgctggagccaaatttcctattaagtggacagcaccagagagtcttgcctacaataccttctcaattaaatctgacgtctgggcttttggggtattgttgtgggaaattgctacctatggaatgtcaccatatccaggtattgacctgtctcaggtctatgacctactagaaaaaggatatcgaatggaacagcctgagggatgcccccctaaggtttatgaacttatgagagcatgctggaagtggagccctgccgataggccctcttttgctgaaacacaccaagcttttgaaaccatgttccatgactccagcatttctgaagaggtagctgaggagcttgggagagccgcctcctcgtcatctgttgttccatacctgccccggctacctatacttccttccaagactcggacactgaagaaacaggtggagaacaaggagaacattgaaggggcacaagatgccacagaaaattctgcttccagtttagcaccagggttcatcagaggtgcacaggcctctagtggatccccagcactgcctcgaaagcaaagagacaagtcacccagcagcctcttggaagatgccaaagagacatgcttcaccagggataggaaggggggcttcttcagctccttcatgaagaagagaaatgctcctacaccccccaaacgcagcagctccttccgagaaatggagaatcagccccataagaaatacgaactcacgggtaacttctcatctgttgcttctctacagcatgctgatgggttctctttcactcctgcccagcaagaggcgaatctggtgccacccaagtgctatggggggagctttgcacagaggaacctctgtaatgacgacggtggtgggggtgggggcagtggcactgctgggggtgggtggtctggcatcacaggcttctttacaccacgcttaatcaaaaagacactgggcttacgagcaggtaaacccacagccagtgatgacacttccaagccttttccaaggtcaaactctacatcttccatgtcctcagggcttccagagcaggataggatggcaatgacccttcccaggaactgccagaggtccaaactccagctggaaaggacagtgtccacctcttctcagccagaagagaatgtggacagggccaatgacatgcttccaaaaaaatcagaggaaagtgctgctccaagcagggagagaccaaaagccaagttattgcccagaggagccacagctcttcctctcagaacaccctctggggatctagccattacagagaaggaccctccaggggtgggagtggctggagtggcagctgcccccaagggtaaagagaagaatggtggggcacgacttgggatggctggagttccagaggatggagagcagccgggctggccttctccagccaaggctgcccccgtcctcccaaccactcacaaccacaaagtgccagtccttatctcacccactctgaaacacactccagctgacgtgcagctcattggcacagactctcaggggaataaattcaggctcttatctgagcatcaggtcacatcctctggagacaaggaccgaccccgacgggtaaaaccaaagtgtgccccacccccaccaccagtgatgagactactgcagcatccgtccatctgctcagaccctacagaagagccaactgccctaactgcaggacagtccacatcagaaacacaggaaggaggaaagaaggcagctctgggcgcagtgcccatcagtgggaaagctgggaggccagtgatgcctccacctcaagtgcctctgcccacatcttccatctcgccagccaaaatggccaatggcacagcaggtactaaagtggctctgagaaaaaccaaacaggccgctgagaaaatctcagcagacaaaatcagcaaagaggccctgctggaatgtgctgacctactgtccagtgcactcacggaacctgtgcccaacagccagctggtagacactggacaccagctgcttgactactgctcaggctatgtggactgcatccctcaaactcgcaacaaatttgccttccgagaggctgtgagcaaactggaactcagcctgcaggagctacaggtttcttcagcagctgctggtgtgcccgggacaaaccctgtccttaataacttattgtcatgtgtacaggaaatcagtgatgtggtgcagaggtag

SEQ ID NO: 678 - DNA, 2685 bp, Homo sapiens
atggcgtggcggtgccccaggatgggcagggtcccgctggcctggtgcttggcgctgtgcggctgggcgtgcatggcccccaggggcacgcaggctgaagaaagtcccttcgtgggcaacccagggaatatcacaggtgcccggggactcacgggcacccttcggtgtcagctccaggttcagggagagccccccgaggtacattggcttcgggatggacagatcctggagctcgcggacagcacccagacccaggtgcccctgggtgaggatgaacaggatgactggatagtggtcagccagctcagaatcacctccctgcagctttccgacacgggacagtaccagtgtttggtgtttctgggacatcagaccttcgtgtcccagcctggctatgttgggctggagggcttgccttacttcctggaggagcccgaagacaggactgtggccgccaacacccccttcaacctgagctgccaagctcagggacccccagagcccgtggacctactctggctccaggatgctgtccccctggccacggctccaggtcacggcccccagcgcagcctgcatgttccagggctgaacaagacatcctctttctcctgcgaagcccataacgccaagggggtcaccacatcccgcacagccaccatcacagtgctcccccagcagccccgtaacctccacctggtctcccgccaacccacggagctggaggtggcttggactccaggcctgagcggcatctaccccctgacccactgcaccctgcaggctgtgctgtcagacgatgggatgggcatccaggcgggagaaccagaccccccagaggagcccctcacctcgcaagcatccgtgcccccccatcagcttcggctaggcagcctccatcctcacaccccttatcacatccgcgtggcatgcaccagcagccagggcccctcatcctggacccactggcttcctgtggagacgccggagggagtgcccctgggcccccctgagaacattagtgctacgcggaatgggagccaggccttcgtgcattggcaagagccccgggcgcccctgcagggtaccctgttagggtaccggctggcgtatcaaggccaggacaccccagaggtgctaatggacatagggctaaggcaagaggtgaccctggagctgcagggggacgggtctgtgtccaatctgacagtgtgtgtggcagcctacactgctgctggggatggaccctggagcctcccagtacccctggaggcctggcgcccagggcaagcacagccagtccaccagctggtgaaggaaccttcaactcctgccttctcgtggccctggtggtatgtactgctaggagcagtcgtggccgctgcctgtgtcctcatcttggctctcttccttgtccaccggcgaaagaaggagacccgttatggagaagtgtttgaaccaacagtggaaagaggtgaactggtagtcaggtaccgcgtgcgcaagtcctacagtcgtcggaccactgaagctaccttgaacagcctgagcatcagtgaagagctgaaggagaagctgcgggatgtgatggtggaccggcacaaggtggccctggggaagactctgggagagggagagtttggagctgtgatggaaggccagctcaaccaggacgactccatcctcaaggtggctgtgaagacgatgaagattgccatctgcacgaggtcagagctggaggatttcctgagtgaagcggtctgcatgaaggaatttgaccatcccaacgtcatgaggctcatcggtgtctgtttccagggttctgaacgagagagcttcccagcacctgtggtcatcttacctttcatgaaacatggagacctacacagcttcctcctctattcccggctcggggaccagccagtgtacctgcccactcagatgctagtgaagttcatggcagacatcgccagtggcatggagtatctgagtaccaagagattcatacaccgggacctggcggccaggaactgcatgctgaatgagaacatgtccgtgtgtgtggcggacttcgggctctccaagaagatctacaatggggactactaccgccagggacgtatcgccaagatgccagtcaagtggattgccattgagagtctagctgaccgtgtctacaccagcaagagcgatgtgtggtccttcggggtgacaatgtgggagattgccacaagaggccaaaccccatatccgggcgtggagaacagcgagatttatgactatctgcgccagggaaatcgcctgaagcagcctgcggactgtctggatggactgtatgccttgatgtcgcggtgctgggagctaaatccccaggaccggccaagttttacagagctgcgggaagatttggagaacacactgaaggccttgcctcctgcccaggagcctgacgaaatcctctatgtcaacatggatgagggtggaggttatcctgaaccccctggagctgcaggaggagctgaccccccaacccagccagaccctaaggattcctgtagctgcctcactgcggctgaggtccatcctgctggacgctatgtcctctgcccttccacaacccctagccccgctcagcctgctgataggggctccccagcagccccagggcaggaggatggtgcctga

SEQ ID NO: 679 - DNA, 3213 bp, Homo sapiens
atgggagctgcgcggggatccccggccagaccccgccggttgcctctgctcagcgtcctgctgctgccgctgctgggcggtacccagacagccattgtcttcatcaagcagccgtcctcccaggatgcactgcaggggcgccgggcgctgcttcgctgtgaggttgaggctccgggcccggtacatgtgtactggctgctcgatggggcccctgtccaggacacggagcggcgtttcgcccagggcagcagcctgagctttgcagctgtggaccggctgcaggactctggcaccttccagtgtgtggctcgggatgatgtcactggagaagaagcccgcagtgccaacgcctccttcaacatcaaatggattgaggcaggtcctgtggtcctgaagcatccagcctcggaagctgagatccagccacagacccaggtcacacttcgttgccacattgatgggcaccctcggcccacctaccaatggttccgagatgggacccccctttctgatggtcagagcaaccacacagtcagcagcaaggagcggaacctgacgctccggccagctggtcctgagcatagtgggctgtattcctgctgcgcccacagtgcttttggccaggcttgcagcagccagaacttcaccttgagcattgctgatgaaagctttgccagggtggtgctggcaccccaggacgtggtagtagcgaggtatgaggaggccatgttccattgccagttctcagcccagccacccccgagcctgcagtggctctttgaggatgagactcccatcactaaccgcagtcgccccccacacctccgcagagccacagtgtttgccaacgggtctctgctgctgacccaggtccggccacgcaatgcagggatctaccgctgcattggccaggggcagaggggcccacccatcatcctggaagccacacttcacctagcagagattgaagacatgccgctatttgagccacgggtgtttacagctggcagcgaggagcgtgtgacctgccttccccccaagggtctgccagagcccagcgtgtggtgggagcacgcgggagtccggctgcccacccatggcagggtctaccagaagggccacgagctggtgttggccaatattgctgaaagtgatgctggtgtctacacctgccacgcggccaacctggctggtcagcggagacaggatgtcaacatcactgtggccactgtgccctcctggctgaagaagccccaagacagccagctggaggagggcaaacccggctacttggattgcctgacccaggccacaccaaaacctacagttgtctggtacagaaaccagatgctcatctcagaggactcacggttcgaggtcttcaagaatgggaccttgcgcatcaacagcgtggaggtgtatgatgggacatggtaccgttgtatgagcagcaccccagccggcagcatcgaggcgcaagcccgtgtccaagtgctggaaaagctcaagttcacaccaccaccccagccacagcagtgcatggagtttgacaaggaggccacggtgccctgttcagccacaggccgagagaagcccactattaagtgggaacgggcagatgggagcagcctcccagagtgggtgacagacaacgctgggaccctgcattttgcccgggtgactcgagatgacgctggcaactacacttgcattgcctccaacgggccgcagggccagattcgtgcccatgtccagctcactgtggcagtttttatcaccttcaaagtggaaccagagcgtacgactgtgtaccagggccacacagccctactgcagtgcgaggcccagggggaccccaagccgctgattcagtggaaaggcaaggaccgcatcctggaccccaccaagctgggacccaggatgcacatcttccagaatggctccctggtgatccatgacgtggcccctgaggactcaggccgctacacctgcattgcaggcaacagctgcaacatcaagcacacggaggcccccctctatgtcgtggacaagcctgtgccggaggagtcggagggccttggcagccctcccccctacaagatgatccagaccattgggttgtcggtgggtgccgctgtggcctacatcattgccgtgctgggcctcatgttctactgcaagaagcgctgcaaagccaagcggctgcagaagcagcccgagggcgaggagccagagatggaatgcctcaacggtgggcctttgcagaacgggcagccctcagcagagatccaagaagaagtggccttgaccagcttgggctccggccccgcggccaccaacaaacgccacagcacaagtgataagatgcacttcccacggtctagcctgcagcccatcaccacgctggggaagagtgagtttggggaggtgttcctggcaaaggctcagggcttggaggagggagtggcagagaccctggtacttgtgaagagcctgcagagcaaggatgagcagcagcagctggacttccggagggagttggagatgtttgggaagctgaaccacgccaacgtggtgcggctcctggggctgtgccgggaggctgagccccactacatggtgctggaatatgtggatctgggagacctcaagcagttcctgaggatttccaagagcaaggatgaaaaattgaagtcacagcccctcagcaccaagcagaaggtggccctatgcacccaggtagccctgggcatggagcacctgtccaacaaccgctttgtgcataaggacttggctgcgcgtaactgcctggtcagtgcccagagacaagtgaaggtgtctgccctgggcctcagcaaggatgtgtacaacagtgagtactaccacttccgccaggcctgggtgccgctgcgctggatgtcccccgaggccatcctggagggtgacttctctaccaagtctgatgtctgggccttcggtgtgctgatgtgggaagtgtttacacatggagagatgccccatggtgggcaggcagatgatgaagtactggcagatttgcaggctgggaaggctagacttcctcagcccgagggctgcccttccaaactctatcggctgatgcagcgctgctgggccctcagccccaaggaccggccctccttcagtgagattgccagcgccctgggagacagcaccgtggacagcaagccgtga

SEQ ID NO: 680 - DNA, 3213 bp, Homo sapiens
atgggagctgcgcggggatccccggccagaccccgccggttgcctctgctcagcgtcctgctgctgccgctgctgggcggtacccagacagccattgtcttcatcaagcagccgtcctcccaggatgcactgcaggggcgccgggcgctgcttcgctgtgaggttgaggctccgggcccggtacatgtgtactggctgctcgatggggcccctgtccaggacacggagcggcgtttcgcccagggcagcagcctgagctttgcagctgtggaccggctgcaggactctggcaccttccagtgtgtggctcgggatgatgtcactggagaagaagcccgcagtgccaacgcctccttcaacatcaaatggattgaggcaggtcctgtggtcctgaagcatccagcctcggaagctgagatccagccacagacccaggtcacacttcgttgccacattgatgggcaccctcggcccacctaccaatggttccgagatgggacccccctttctgatggtcagagcaaccacacagtcagcagcaaggagcggaacctgacgctccggccagctggtcctgagcatagtgggctgtattcctgctgcgcccacagtgcttttggccaggcttgcagcagccagaacttcaccttgagcattgctgatgaaagctttgccagggtggtgctggcaccccaggacgtggtagtagcgaggtatgaggaggccatgttccattgccagttctcagcccagccacccccgagcctgcagtggctctttgaggatgagactcccatcactaaccgcagtcgccccccacacctccgcagagccacagtgtttgccaacgggtctctgctgctgacccaggtccggccacgcaatgcagggatctaccgctgcattggccaggggcagaggggcccacccatcatcctggaagccacacttcacctagcagagattgaagacatgccgctatttgagccacgggtgtttacagctggcagcgaggagcgtgtgacctgccttccccccaagggtctgccagagcccagcgtgtggtgggagcacgcgggagtccggctgcccacccatggcagggtctaccagaagggccacgagctggtgttggccaatattgctgaaagtgatgctggtgtctacacctgccacgcggccaacctggctggtcagcggagacaggatgtcaacatcactgtggccactgtgccctcctggctgaagaagccccaagacagccagctggaggagggcaaacccggctacttggattgcctgacccaggccacaccaaaacctacagttgtctggtacagaaaccagatgctcatctcagaggactcacggttcgaggtcttcaagaatgggaccttgcgcatcaacagcgtggaggtgtatgatgggacatggtaccgttgtatgagcagcaccccagccggcagcatcgaggcgcaagcccgtgtccaagtgctggaaaagctcaagttcacaccaccaccccagccacagcagtgcatggagtttgacaaggaggccacggtgccctgttcagccacaggccgagagaagcccactattaagtgggaacgggcagatgggagcagcctcccagagtgggtgacagacaacgctgggaccctgcattttgcccgggtgactcgagatgacgctggcaactacacttgcattgcctccaacgggccgcagggccagattcgtgcccatgtccagctcactgtggcagtttttatcaccttcaaagtggaaccagagcgtacgactgtgtaccagggccacacagccctactgcagtgcgaggcccagggggaccccaagccgctgattcagtggaaaggcaaggaccgcatcctggaccccaccaagctgggacccaggatgcacatcttccagaatggctccctggtgatccatgacgtggcccctgaggactcaggccgctacacctgcattgcaggcaacagctgcaacatcaagcacacggaggcccccctctatgtcgtggacaagcctgtgccggaggagtcggagggccctggcagccctcccccctacaagatgatccagaccattgggttgtcggtgggtgccgctgtggcctacatcattgccgtgctgggcctcatgttctactgcaagaagcgctgcaaagccaagcggctgcagaagcagcccgagggcgaggagccagacatggaatgcctcaacggtgggcctttgcagaacgggcagccctcagcagagatccaagaagaagtggccttgaccagcttgggctccggccccgcggccaccaacaaacgccacagcacaagtgataagatgcacttcccacggtctagcctgcagcccatcaccacgctggggaagagtgagtttggggaggtgttcctggcaaaggctcagggcttggaggagggagtggcagagaccctggtacttgtgaagagcctgcagagcaaggatgagcagcagcagctggacttccggagggagttggagatgtttgggaagctgaaccacgccaacgtggtgcggctcctggggctgtgccgggaggctgagccccactacatggtgctggaatatgtggatctgggagacctcaagcagttcctgaggatttccaagagcaaggatgaaaaattgaagtcacagcccctcagcaccaagcagaaggtggccctatgcacccaggtagccctgggcatggagcacctgtccaacaaccgctttgtgcataaggacttggctgcgcgtaactgcctggtcagtgcccagagacaagtgaaggtgtctgccctgggcctcagcaaggatgtgtacaacagtgagtactaccacttccgccaggcctgggtgccgctgcgctggatgtcccccgaggccatcctggagggtgacttctctaccaagtctgatgtctgggccttcggtgtgctgatgtgggaagtgtttacacatggagagatgccccatggtgggcaggcagatgatgaagtactggcagatttgcaggctgggaaggctagacttcctcagcccgagggctgcccttccaaactctatcggctgatgcagcgctgctgggccctcagccccaaggaccggccctccttcagtgagattgccagcgccctgggagacagcaccgtggacagcaagccgtga

SEQ ID NO: 681 - DNA, 3213 bp, Homo sapiens
atgggagctgcgcggggatccccggccagaccccgccggttgcctctgctcagcgtcctgctgctgccgctgctgggcggtacccagacagccattgtcttcatcaagcagccgtcctcccaggatgcactgcaggggcgccgggcgctgcttcgctgtgaggttgaggctccgggcccggtacatgtgtactggctgctcgatggggcccctgtccaggacacggagcggcgtttcgcccagggcagcagcctgagctttgcagctgtggaccggctgcaggactctggcaccttccagtgtgtggctcgggatgatgtcactggagaagaagcccgcagtgccaacgcctccttcaacatcaaatggattgaggcaggtcctgtggtcctgaagcatccagcctcggaagctgagatccagccacagacccaggtcacacttcgttgccacattgatgggcaccctcggcccacctaccaatggttccgagatgggacccccctttctgatggtcagagcaaccacacagtcagcagcaaggagcggaacctgacgctccggccagctggtcctgagcatagtgggctgtattcctgctgcgcccacagtgcttttggccaggcttgcagcagccagaacttcaccttgagcattgctgatgaaagctttgccagggtggtgctggcaccccaggacgtggtagtagcgaggtatgaggaggccatgttccattgccagttctcagcccagccacccccgagcctgcagtggctctttgaggatgagactcccatcactaaccgcagtcgccccccacacctccgcagagccacagtgtttgccaacgggtctctgctgctgacccaggtccggccacgcaatgcagggatctaccgctgcattggccaggggcagaggggcccacccatcatcctggaagccacacttcacctagcagagattgaagacatgccgctatttgagccacgggtgtttacagctggcagcgaggagcgtgtgacctgccttccccccaagggtctgccagagcccagcgtgtggtgggagcacgcgggagtccggctgcccacccatggcagggtctaccagaagggccacgagctggtgttggccaatattgctgaaagtgatgctggtgtctacacctgccacgcggccaacctggctggtcagcggagacaggatgtcaacatcactgtggccactgtgccctcctggctgaagaagccccaagacagccagctggaggagggcaaacccggctacttggattgcctgacccaggccacaccaaaacctacagttgtctggtacagaaaccagatgctcatctcagaggactcacggttcgaggtcttcaagaatgggaccttgcgcatcaacagcgtggaggtgtatgatgggacatggtaccgttgtatgagcagcaccccagccggcagcatcgaggcgcaagcccgtgtccaagtgctggaaaagctcaagttcacaccaccaccccagccacagcagtgcatggagtttgacaaggaggccacggtgccctgttcagccacaggccgagagaagcccactattaagtgggaacgggcagatgggagcagcctcccagagtgggtgacagacaacgctgggaccctgcattttgcccgggtgactcgagatgacgctggcaactacacttgcattgcctccaacgggccgcagggccagattcgtgcccatgtccagctcactgtggcagtttttatcaccttcaaagtggaaccagagcgtacgactgtgtaccagggccacacagccctactgcagtgcgaggcccagggggaccccaagccgctgattcagtggaaaggcaaggaccgcatcctggaccccaccaagctgggacccaggatgcacatcttccagaatggctccctggtgatccatgacgtggcccctgaggactcaggccgctacacctgcattgcaggcaacagctgcaacatcaagcacacggaggcccccctctatgtcgtggacaagcctgtgccggaggagtcggagggccctggcagccctcccccctacaagatgatccagaccattgggttgtcggtgggtgccgctgtggcctacatcattgccgtgctgggcctcatgttctactgcaagaagcgctgcaaagccaagcggctgcagaagcagcccgagggcgaggagccagagatggaatgcctcaacggtgggcctttgcagaacgggcagccctcagcagagatccaagaagaagtggccttgaccagcttgggctccggccccgtggccaccaacaaacgccacagcacaagtgataagatgcacttcccacggtctagcctgcagcccatcaccacgctggggaagagtgagtttggggaggtgttcctggcaaaggctcagggcttggaggagggagtggcagagaccctggtacttgtgaagagcctgcagagcaaggatgagcagcagcagctggacttccggagggagttggagatgtttgggaagctgaaccacgccaacgtggtgcggctcctggggctgtgccgggaggctgagccccactacatggtgctggaatatgtggatctgggagacctcaagcagttcctgaggatttccaagagcaaggatgaaaaattgaagtcacagcccctcagcaccaagcagaaggtggccctatgcacccaggtagccctgggcatggagcacctgtccaacaaccgctttgtgcataaggacttggctgcgcgtaactgcctggtcagtgcccagagacaagtgaaggtgtctgccctgggcctcagcaaggatgtgtacaacagtgagtactaccacttccgccaggcctgggtgccgctgcgctggatgtcccccgaggccatcctggagggtgacttctctaccaagtctgatgtctgggccttcggtgtgctgatgtgggaagtgtttacacatggagagatgccccatggtgggcaggcagatgatgaagtactggcagatttgcaggctgggaaggctagacttcctcagcccgagggctgcccttccaaactctatcggctgatgcagcgctgctgggccctcagccccaaggaccggccctccttcagtgagattgccagcgccctgggagacagcaccgtggacagcaagccgtga

SEQ ID NO: 682 - DNA, 3213 bp, Homo sapiens
atgggagctgcgcggggatccccggccagaccccgccggttgcctctgctcagcgtcctgctgctgccgctgctgggcggtacccagacagccattgtcttcatcaagcagccgtcctcccaggatgcactgcaggggcgccgggcgctgcttcgctgtgaggttgaggctccgggcccggtacatgtgtactggctgctcgatggggcccctgtccaggacacggagcggcgtttcgcccagggcagcagcctgagctttgcagctgtggaccggctgcaggactctggcaccttccagtgtgtggctcgggatgatgtcactggagaagaagcccgcagtgccaacgcctccttcaacatcaaatggattgaggcaggtcctgtggtcctgaagcatccagcctcggaagctgagatccagccacagacccaggtcacacttcgttgccacattgatgggcaccctcggcccacctaccaatggttccgagatgggacccccctttctgatggtcagagcaaccacacagtcagcagcaaggagcggaacctgacgctccggccagctggtcctgagcatagtgggctgtattcctgctgcgcccacagtgcttttggccaggcttgcagcagccagaacttcaccttgagcattgctgatgaaagctttgccagggtggtgctggcaccccaggacgtggtagtagcgaggtatgaggaggccatgttccattgccagttctcagcccagccacccccgagcctgcagtggctctttgaggatgagactcccatcactaaccgcagtcgccccccacacctccgcagagccacagtgtttgccaacgggtctctgctgctgacccaggtccggccacgcaatgcagggatctaccgctgcattggccaggggcagaggggcccacccatcatcctggaagccacacttcacctagcagagattgaagacatgccgctatttgagccacgggtgtttacagctggcagcgaggagcgtgtgacctgccttccccccaagggtctgccagagcccagcgtgtggtgggagcacgcgggagtccggctgcccacccatggcagggtctaccagaagggccacgagctggtgttggccaatattgctgaaagtgatgctggtgtctacacctgccacgcggccaacctggctggtcagcggagacaggatgtcaacatcactgtggccactgtgccctcctggctgaagaagccccaagacagccagctggaggagggcaaacccggctacttggattgcctgacccaggccacaccaaaacctacagttgtctggtacagaaaccagatgctcatctcagaggactcacggttcgaggtcttcaagaatgggaccttgcgcatcaacagcgtggaggtgtatgatgggacatggtaccgttgtatgagcagcaccccagccggcagcatcgaggcgcaagcccgtgtccaagtgctggaaaagctcaagttcacaccaccaccccagccacagcagtgcatggagtttgacaaggaggccacggtgccctgttcagccacaggccgagagaagcccactattaagtgggaacgggcagatgggagcagcctcccagagtgggtgacagacaacgctgggaccctgcattttgcccgggtgactcgagatgacgctggcaactacacttgcattgcctccaacgggccgcagggccagattcgtgcccatgtccagctcactgtggcagtttttatcaccttcaaagtggaaccagagcgtacgactgtgtaccagggccacacagccctactgcagtgcgaggcccagggggaccccaagccgctgattcagtggaaaggcaaggaccgcatcctggaccccaccaagctgggacccaggatgcacatcttccagaatggctccctggtgatccatgacgtggcccctgaggactcaggccgctacacctgcattgcaggcaacagctgcaacatcaagcacacggaggcccccctctatgtcgtggacaagcctgtgccggaggagtcggagggccctggcagccctcccccctacaagatgatccagaccattgggttgtcggtgggtgccgctgtggcctacatcattgccgtgctgggcctcatgttctactgcaagaagcgctgcaaagccaagcggctgcagaagcagcccgagggcgaggagccagagatggaatgcctcaacggtgggcctttgcagaacgggcagccctcagcagagatccaagaagaagtggccttgaccagcttgggctccggccccgcggccaccaacaaacgccacagcacaagtgataagatgcacttcccacggtctaggctgcagcccatcaccacgctggggaagagtgagtttggggaggtgttcctggcaaaggctcagggcttggaggagggagtggcagagaccctggtacttgtgaagagcctgcagagcaaggatgagcagcagcagctggacttccggagggagttggagatgtttgggaagctgaaccacgccaacgtggtgcggctcctggggctgtgccgggaggctgagccccactacatggtgctggaatatgtggatctgggagacctcaagcagttcctgaggatttccaagagcaaggatgaaaaattgaagtcacagcccctcagcaccaagcagaaggtggccctatgcacccaggtagccctgggcatggagcacctgtccaacaaccgctttgtgcataaggacttggctgcgcgtaactgcctggtcagtgcccagagacaagtgaaggtgtctgccctgggcctcagcaaggatgtgtacaacagtgagtactaccacttccgccaggcctgggtgccgctgcgctggatgtcccccgaggccatcctggagggtgacttctctaccaagtctgatgtctgggccttcggtgtgctgatgtgggaagtgtttacacatggagagatgccccatggtgggcaggcagatgatgaagtactggcagatttgcaggctgggaaggctagacttcctcagcccgagggctgcccttccaaactctatcggctgatgcagcgctgctgggccctcagccccaaggaccggccctccttcagtgagattgccagcgccctgggagacagcaccgtggacagcaagccgtga

SEQ ID NO: 683 - DNA, 2919 bp, Homo sapiens
atgggcccaggagttctgctgctcctgctggtggccacagcttggcatggtcagggaatcccagtgatagagcccagtgtccctgagctggtcgtgaagccaggagcaacggtgaccttgcgatgtgtgggcaatggcagcgtggaatgggatggccccccatcacctcactggaccctgtactctgatggctccagcagcatcctcagcaccaacaacgctaccttccaaaacacggggacctatcgctgcactgagcctggagaccccctgggaggcagcgccgccatccacctctatgtcaaagaccctgcccggccctggaacgtgctagcacaggaggtggtcgtgttcgaggaccaggacgcactactgccctgtctgctcacagacccggtgctggaagcaggcgtctcgctggtgcgtgtgcgtggccggcccctcatgcgccacaccaactactccttctcgccctggcatggcttcaccatccacagggccaagttcattcagagccaggactatcaatgcagtgccctgatgggtggcaggaaggtgatgtccatcagcatccggctgaaagtgcagaaagtcatcccagggcccccagccttgacactggtgcctgcagagctggtgcggattcgaggggaggctgcccagatcgtgtgctcagccagcagcgttgatgttaactttgatgtcttcctccaacacaacaacaccaagctcgcaatccctcaacaatctgactttcataataaccgttaccaaaaagtcctgaccctcaacctcgatcaagtagatttccaacatgccggcaactactcctgcgtggccagcaacgtgcagggcaagcactccacctccatgttcttccgggtggtagagagtgcctacttgaacttgagctctgagcagaacctcatccaggaggtgaccgtgggggaggggctcaacctcaaagtcatggtggaggcctacccaggcctgcaaggttttaactggacctacctgggacccttttctgaccaccagcctgagcccaagcttgctaatgctaccaccaaggacacatacaggcgcaccttcaccctctctctgccccgcctgaagccctctgaggctggccgctactccttcctggccagaaacccaggaggctggagagctctgacgtttgagctcacccttcgataccccccagaggtaagcgtcatatggacattcatcaacggctctggcacccttttgtgtgctgcctctgggtacccccagcccaacgtgacatggctgcagtgcagtggccacactgataggtgtgatgaggcccaagtgctgcaggtctgggatgacccataccctgaggtcctgagccaggagcccttccacaaggtgacggtgcagagcctgctgactgttgagaccttagagcacaaccaaacctacgagtgcagggcccacaacagcgtggggagtggctcctgggccttcatacccatctctgcaggagcccacacgcatcccccggatgagttcctcttcacaccagtggtggtcgcctgcatgtccatcatggccttgctgctgctgctgctcctgctgctattgtacaagtataagcagaagcccaagtaccaggtccgctggaagatcatcgagagctatgagggcaacagttatactttcatcgaccccacgcagctgccttacaacgagaagtgggagttcccccggaacaacctgcagtttggtaagaccctcggagctggagcctttgggaaggtggtggaggccacggcctttggtctgggcaaggaggatgctgtcctgaaggtggctgtgaagatgctgaagtccacggcccatgctgatgagaaggaggccctcatgtccgagctgaagatcatgagccacctgggccagcacgagaacatcgtcaaccttctgggagcctgtacccatggaggccctgtactggtcatcacggagtactgttgctatggcgacctgctcaactttctgcgaaggaaggctgaggccatgctgggacccagcctgagccccggccaggaccccgagggaggcgtcgactataagaacatccacctcgagaagaaatatgtccgcagggacagtggcttctccagccagggtgtggacacctatgtggagatgaggcctgtctccacttcttcaaatgactccttctctgagcaagacctggacaaggaggatggacggcccctggagctccgggacctgcttcacttctccagccaagtagcccagggcatggccttcctcgcttccaagaattgcatccaccgggacgtggcagcgcgtaacgtgctgttgaccaatggtcatgtggccaagattggggacttcgggctggctagggacatcatgaatgactccaactacattgtcaagggcaatgcccgcctgcctgtgaagtggatggccccagagagcatctttgactgtgtctacacggttcagagcgacgtctggtcctatggcatcctcctctgggagatcttctcacttgggctgaatccctaccctggcatcctggtgaacagcaagttctataaactggtgaaggatggataccaaatggcccagcctgcatttgccccaaagaatatatacagcatcatgcaggcctgctgggccttggagcccacccacagacccaccttccagcagatctgctccttccttcaggagcaggcccaagaggacaggagagagcgggactataccaatctgccgagcagcagcagaagcggtggcagcggcagcagcagcagtgagctggaggaggagagctctagtgagcacctgacctgctgcgagcaaggggatatcgcccagcccttgctgcagcccaacaactatcagttctgctga

SEQ ID NO: 684 - DNA, 3633 bp, Homo sapiens
atgcgaccctccgggacggccggggcagcgctcctggcgctgctggctgcgctctgcccggcgagtcgggctctggaggaaaagaaagtttgccaaggcacgagtaacaagctcacgcagttgggcacttttgaagatcattttctcagcctccagaggatgttcaataactgtgaggtggtccttgggaatttggaaattacctatgtgcagaggaattatgatctttccttcttaaagaccatccaggaggtggctggttatgtcctcattgccctcaacacagtggagcgaattcctttggaaaacctgcagatcatcagaggaaatatgtactacgaaaattcctatgccttagcagtcttatctaactatgatgcaaataaaaccggactgaaggagctgcccatgagaaatttacaggaaatcctgcatggcgccgtgcggttcagcaacaaccctgccctgtgcaacgtggagagcatccagtggcgggacatagtcagcagtgactttctcagcaacatgtcgatggacttccagaaccacctgggcagctgccaaaagtgtgatccaagctgtcccaatgggagctgctggggtgcaggagaggagaactgccagaaactgaccaaaatcatctgtgcccagcagtgctccgggcgctgccgtggcaagtcccccagtgactgctgccacaaccagtgtgctgcaggctgcacaggcccccgggagagcgactgcctggtctgccgcaaattccgagacgaagccacgtgcaaggacacctgccccccactcatgctctacaaccccaccacgtaccagatggatgtgaaccccgagggcaaatacagctttggtgccacctgcgtgaagaagtgtccccgtaattatgtggtgacagatcacggctcgtgcgtccgagcctgtggggccgacagctatgagatggaggaagacggcgtccgcaagtgtaagaagtgcgaagggccttgccgcaaagtgtgtaacggaataggtattggtgaatttaaagactcactctccataaatgctacgaatattaaacacttcaaaaactgcacctccatcagtggcgatctccacatcctgccggtggcatttaggggtgactccttcacacatactcctcctctggatccacaggaactggatattctgaaaaccgtaaaggaaatcacagggtttttgctgattcaggcttggcctgaaaacaggacggacctccatgcctttgagaacctagaaatcatacgcggcaggaccaagcaacatggtcagttttctcttgcagtcgtcagcctgaacataacatccttgggattacgctccctcaaggagataagtgatggagatgtgataatttcaggaaacaaaaatttgtgctatgcaaatacaataaactggaaaaaactgtttgggacctccggtcagaaaaccaaaattataagcaacagaggtgaaaacagctgcaaggccacaggccaggtctgccatgccttgtgctcccccgagggctgctggggcccggagcccaaggactgcgtctcttgccggaatgtcagccgaggcagggaatgcgtggacaagtgcaaccttctggagggtgagccaagggagtttgtggagaactctgagtgcatacagtgccacccagagtgcctgcctcaggccatgaacatcacctgcacaggacggggaccagacaactgtatccagtgtgcccactacattgacggcccccactgcgtcaagacctgcccggcaggagtcatgggagaaaacaacaccctggtctggaagtacgcagacgccggccatgtgtgccacctgtgccatccaaactgcacctacggatgcactgggccaggtcttgaaggctgtccaacgaatgggcctaagatcccgtccatcgccactgggatggtgggggccctcctcttgctgctggtggtggccctggggatcggcctcttcatgcgaaggcgccacatcgttcggaagcgcacgctgcggaggctgctgcaggagagggagcttgtggagcctcttacacccagtggagaagctcccaaccaagctctcttgaggatcttgaaggaaactgaattcaaaaagatcaaagtgctgggctccggtgcgttcggcacggtgtataagggactctggatcccagaaggtgagaaagttaaaattcccgtcgctatcaaggaattaagagaagcaacatctccgaaagccaacaaggaaatcctcgatgaagcctacgtgatggccagcgtggacaacccccacgtgtgccgcctgctgggcatctgcctcacctccaccgtgcagctcatcacgcagctcatgcccttcggctgcctcctggactatgtccgggaacacaaagacaatattggctcccagtacctgctcaactggtgtgtgcagatcgcaaagggcatgaactacttggaggaccgtcgcttggtgcaccgcgacctggcagccaggaacgtactggtgaaaacaccgcagcatgtcaagatcacagattttgggctggccaaactgctgggtgcggaagagaaagaataccatgcagaaggaggcaaagtgcctatcaagtggatggcattggaatcaattttacacagaatctatacccaccagagtgatgtctggagctacggggtgaccgtttgggagttgatgacctttggatccaagccatatgacggaatccctgccagcgagatctcctccatcctggagaaaggagaacgcctccctcagccacccatatgtaccatcgatgtctacatgatcatggtcaagtgctggatgatagacgcagatagtcgcccaaagttccgtgagttgatcatcgaattctccaaaatggcccgagacccccagcgctaccttgtcattcagggggatgaaagaatgcatttgccaagtcctacagactccaacttctaccgtgccctgatggatgaagaagacatggacgacgtggtggatgccgacgagtacctcatcccacagcagggcttcttcagcagcccctccacgtcacggactcccctcctgagctctctgagtgcaaccagcaacaattccaccgtggcttgcattgatagaaatgggctgcaaagctgtcccatcaaggaagacagcttcttgcagcgatacagctcagaccccacaggcgccttgactgaggacagcatagacgacaccttcctcccagtgcctgaatacataaaccagtccgttcccaaaaggcccgctggctctgtgcagaatcctgtctatcacaatcagcctctgaaccccgcgcccagcagagacccacactaccaggacccccacagcactgcagtgggcaaccccgagtatctcaacactgtccagcccacctgtgtcaacagcacattcgacagccctgcccactgggcccagaaaggcagccaccaaattagcctggacaaccctgactaccagcaggacttctttcccaaggaagccaagccaaatggcatctttaagggctccacagctgaaaatgcagaatacctaagggtcgcgccacaaagcagtgaatttattggagcatga

SEQ ID NO: 685 - DNA, 2931 bp, Homo sapiens
atggagcggcgctggcccctggggctagggctggtgctgctgctctgcgccccgctgcccccgggggcgcgcgccaaggaagttactctgatggacacaagcaaggcacagggagagctgggctggctgctggatcccccaaaagatgggtggagtgaacagcaacagatactgaatgggacacccctgtacatgtaccaggactgcccaatgcaaggacgcagagacactgaccactggcttcgctccaattggatctaccgcggggaggaggcttcccgcgtccacgtggagctgcagttcaccgtgcgggactgcaagagtttccctgggggagccgggcctctgggctgcaaggagaccttcaaccttctgtacatggagagtgaccaggatgtgggcattcagctccgacggcccttgttccagaaggtaaccacggtggctgcagaccagagcttcaccattcgagaccttgtgtctggctccgtgaagctgaatgtggagcgctgctctctgggccgcctgacccgccgtggcctctacctcgctttccacaacccgggtgcctgtgtggccctggtgtctgtccgggtcttctaccagcgctgtcctgagaccctgaatggcttggcccaattcccagacactctgcctggccccgctgggttggtggaagtggcggggacctgcttgccccacgcgcgggccagccccaggccctcaggtgcaccccgcatgcactgcagccctgatggcgagtggctggtgcctgtaggacggtgccactgtgagcctggctatgaggaaggtggcagtggcgaagcatgtgttgcctgccctagcggctcctaccggatggacatggacacaccccattgtctcacgtgcccccagcagagcactgctgagtctgagggggccaccatctgtacctgtgagagcggccattacagagctcccggggagggcccccaggtggcatgcacaggtcccccctcggccccccgaaacctgagcttctctgcctcagggactcagctctccctgcgttgggaacccccagcagatacggggggacgccaggatgtcagatacagtgtgaggtgttcccagtgtcagggcacagcacaggacggggggccctgccagccctgtggggtgggcgtgcacttctcgccgggggcccgggggctcaccacacctgcagtgcatgtcaatggccttgaaccttatgccaactacacctttaatgtggaagcccaaaatggagtgtcagggctgggcagctctggccatgccagcacctcagtcagcatcagcatggggcatgcagagtcactgtcaggcctgtctctgagactggtgaagaaagaaccgaggcaactagagctgacctgggcggggtcccggccccgaagccctggggcgaacctgacctatgagctgcacgtgctgaaccaggatgaagaacggtaccagatggttctagaacccagggtcttgctgacagagctgcagcctgacaccacatacatcgtcagagtccgaatgctgaccccactgggtcctggccctttctcccctgatcatgagtttcggaccagcccaccagtgtccaggggcctgactggaggagagattgtagccgtcatctttgggctgctgcttggtgcagccttgctgcttgggattctcgttttccggtccaggagagcccagcggcagaggcagcagaggcagcgtgaccgcgccaccgatgtggatcgagaggacaagctgtggctgaagccttatgtggacctccaggcatacgaggaccctgcacagggagccctggactttacccgggagcttgatccagcgtggctgatggtggacactgtcataggagaaggagagtttggggaagtgtatcgagggaccctgaggctccccagccaggactgcaagactgtggccattaagaccttaaaagacacatccccaggtggccagtggtggaacttccttcgagaggcaactatcatgggccagtttagccacccgcatattctgcatctggaaggcgtcgtcacaaagcgaaagccgatcatgatcatcacagaatttatggagaatggagccctggatgccttcctgagggagcgggaggaccagctggtccctgggcagctagtggccatgctgcagggcatagcatctggcatgaactacctcagtaatcacaattatgtccaccgggacctggctgccagaaacatcttggtgaatcaaaacctgtgctgcaaggtgtctgactttggcctgactcgcctcctggatgactttgatggcacatacgaaacccagggaggaaagatccctatccgttggacagcccctgaagccattgcccatcggatcttcaccacagccagcgatgtgtggagctttgggattgtgatgtgggaggtgctgagctttggggacaagccttatggggagatgagcaatcaggaggttatgaagagcattgaggatgggtaccggttgccccctcctgtggactgccctgcccctctgtatgagctcatgaagaactgctgggcatatgaccgtgcccgccggccacacttccagaagcttcaggcacatctggagcaactgcttgccaacccccactccctgcggaccattgccaactttgaccccagggtgactcttcgcctgcccagcctgagtggctcagatgggatcccatatcgaaccgtctctgagtggctcgagtccatacgcatgaaacgctacatcctgcacttccactcggctgggctggacaccatggagtgtgtgctggagctgaccgctgaggacctgacgcagatgggaatcacactgcccgggcaccagaagcgcattctttgcagtattcagggattcaaggactga

SEQ ID NO: 686 - DNA, 2931 bp, Homo sapiens
atggagcggcgctggcccctggggctagggctggtgctgctgctctgcgccccgctgcccccgggggcgcgcgccaaggaagttactctgatggacacaagcaaggcacagggagagctgggctggctgctggatcccccaaaagatgggtggagtgaacagcaacagatactgaatgggacacccctgtacatgtaccaggactgcccaatgcaaggacgcagagacactgaccactggcttcgctccaattggatctaccgcggggaggaggcttcccgcgtccacgtggagctgcagttcaccgtgcgggactgcaagagtttccctgggggagccgggcctctgggctgcaaggagaccttcaaccttctgtacatggagagtgaccaggatgtgggcattcagctccgacggcccttgttccagaaggtaaccacggtggctgcagaccagagcttcaccattcgagaccttgcgtctggctccgtgaagctgaatgtggagcgctgctctctgggccgcctgacccgccgtggcctctacctcgctttccacaacccgggtgcctgtgtggccctggtgtctgtccgggtcttctaccagcgctgtcctgagaccctgaatggcttggcccaattcccagacactctgcctggccccgctgggttggtggaagtggcggggacctgcttgccccacgcgcgggccagccccaggccctcaggtgcaccccgcatgcactgcagccctgatggcgagtggctggtgcctgtaggacggtgccactgtgagcctggctatgaggaaggtggcagtggcgaagcatgtgttgcctgccctagcggctcctaccggatggacatggacacaccccattgtctcacgtgcccccagcagagcactgctgagtctgagggggccaccatctgtacctgtgagagcggccattacagagctcccggggagggcccccaggtggcatgcacaggtcccccctcggccccccgaaacctgagcttctctgcctcagggactcagctctccctgcgttgggaacccccagcagatacggggggacgccaggatgtcagatacagtgtgaggtgttcccagtgtcagggcacagcacaggacggggggccctgccagccctgtggggtgggcgtgcacttctcgccgggggcccgggggctcaccacacctgcagtgcatgtcaatggccttgaaccttatgccaactacacctttaatgtggaagcccaaaatggagtgtcagggctgggcagctctggccatgccagcacctcagtcagcatcagcatggggcatgcagagtcactgtcaggcctgtctctgagactggtgaagaaagaaccgaggcaactagagctgacctgggcggggtcccggccccgaagccctggggcgaacctgacctatgagctgcacgtgctgaaccaggatgaagaacggtaccagatggttctagaacccagggtcttgctgacagagctgcagcctgacaccacatacatcgtcagagtccgaatgctgaccccactgggtcctggccctttctcccctgatcatgagtttcggaccagcccaccagtgtccaggggcctgactggaggagagattgtagccgtcatctttgggctgctgcttggtgcagccttgctgcttgggattctcgttttccggtccaggagagcccagcggcagaggcagcagaggcagcgtgaccgcgccaccgatgtggatcgagaggacaagctgtggctgaagccttatgtggacctccaggcatacgaggaccctgcacagggagccctggactttacccgggagcttgatccagcgtggctgatggtggacactgtcataggagaaggagagtttggggaagtgtatcgagggaccctgaggctccccagccaggactgcaagactgtggccattaagaccttaaaagacacatccccaggtggccagtggtggaacttccttcgagaggcaactatcatgggccagtttagccacccgcatattctgcatctggaaggcgtcgtcacaaagcgaaagccgatcatgatcatcacagaatttatggagaatggagccctggatgccttcctgagggagcgggaggaccagctggtccctgggcagctagtggccatgctgcagggcatagcatctggcatgaactacctcagtaatcacaattatgtccaccgggacctggctgccagaaacatcttggtgaatcaaaacctgtgctgcaaggtgtctgactttggcctgactcgcctcctggatgactttgatggcacatacgaaacccagggaggaaagatccctatccgttggacagcccctgaagccattgcccatcggatcttcaccacagccagcgatgtgtggagctttgggattgtgatgtgggaggtgctgagctttggggacaagccttatggggagatgagcaatcaggaggttatgaagagcattgaggatgggtaccggttgccccctcctgtggactgccctgcccctctgtatgagctcatgaagaactgctgggcatatgaccgtgcccgccggccacacttccagaagcttcaggcacatctggagcaactgcttgccaacccccactccctgcggaccattgccaactttgaccccaggatgactcttcgcctgcccagcctgagtggctcagatgggatcccatatcgaaccgtctctgagtggctcgagtccatacgcatgaaacgctacatcctgcacttccactcggctgggctggacaccatggagtgtgtgctggagctgaccgctgaggacctgacgcagatgggaatcacactgcccgggcaccagaagcgcattctttgcagtattcagggattcaaggactga

SEQ ID NO: 687 - DNA, 2931 bp, Homo sapiens
atggagcggcgctggcccctggggctagggctggtgctgctgctctgcgccccgctgcccccgggggcgcgcgccaaggaagttactctgatggacacaagcaaggcacagggagagctgggctggctgctggatcccccaaaagatgggtggagtgaacagcaacagatactgaatgggacacccctgtacatgtaccaggactgcccaatgcaaggacgcagagacactgaccactggcttcgctccaattggatctaccgcggggaggaggcttcccgcgtccacgtggagctgcagttcaccgtgcgggactgcaagagtttccctgggggagccgggcctctgggctgcaaggagaccttcaaccttctgtacatggagagtgaccaggatgtgggcattcagctccgacggcccttgttccagaaggtaaccacggtggctgcagaccagagcttcaccattcgagaccttgcgtctggctccgtgaagctgaatgtggagcgctgctctctgggccgcctgacccgccgtggcctctacctcgctttccacaacccgggtgcctgtgtggccctggtgtctgtccgggtcttctaccagcgctgtcctgagaccctgaatggcttggcccaattcccagacactctgcctggccccgctgggttggtggaagtggcggggacctgcttgccccacgcgcgggccagccccaggccctcaggtgcaccccgcatgcactgcagccctgatggcgagtggctggtgcctgtaggacggtgccactgtgagcctggctatgaggaaggtggcagtggcgaagcatgtgttgcctgccctagcggctcctaccggatggacatggacacaccccattgtctcacgtgcccccagcagagcactgctgagtctgagggggccaccatctgtacctgtgagagcggccattacagagctcccggggagggcccccaggtggcatgcacaggtcccccctcggccccccgaaacctgagcttctctgcctcagggactcagctctccctgcgttgggaacccccagcagatacggggggacgccaggatgtcagatacagtgtgaggtgttcccagtgtcagggcacagcacaggacggggggccctgccagccctgtggggtgggcgtgcacttctcgccgggggcccgggggctcaccacacctgcagtgcatgtcaatggccttgaaccttatgccaactacacctttaatgtggaagcccaaaatggagtgtcagggctgggcagctctggccatgccagcacctcagtcagcatcagcatggggcatgcagagtcactgtcaggcctgtctctgagactggtgaagaaagaaccgaggcaactagagctgacctgggcggggtcccggccccgaagccctggggcgaacctgacctatgagctgcacgtgctgaaccaggatgaagaacggtaccagatggttctagaacccagggtcttgctgacagagctgcagcctgacaccacatacatcgtcagagtccgaatgctgaccccactgggtcctggccctttctcccctgatcatgagtttcggaccagcccaccagtgtccaggggcctgactggaggagagattgtagccgtcatctttgggctgctgcttggtgcagccttgctgcttgggattctcgttttccggtccaggagagcccagcggcagaggcagcagaggcagcgtgaccgcgccaccgatgtggatcgagaggacaagctgtggctgaagccttatgtggacctccaggcatacgaggaccctgcacagggagccctggactttacccgggagcttgatccagcgtggctgatggtggacactgtcataggagaaggagagtttggggaagtgtatcgagggaccctgaggctccccagccaggactgcaagactgtggccattaagaccttaaaagacacatccccaggtggccagtggtggaacttccttcgagaggcaactatcatgggccagtttagccacccgcatattctgcatctggaaggcgtcgtcacaaagcgaaagccgatcatgatcatcacagaatttatggagaatggagccctggatgccttcctgagggagcgggaggaccagctggtccctgggcagctagtggccatgctgcagggcatagcatctggcatgaactacctcagtaatcacaattatgtccaccgggacctggctgccagaaacatcttggtgaatcaaaacctgtgctgcaaggtgtctgactttggcctgactcgcctcctggatgactttgatggcacatacgaaacccagggaggaaagatccctatccgttggacagcccctgaagccattgcccatcggatcttcaccacagccagcgatgtgtggagctttgggattgtgatgtgggaggtgctgagctttggggacaagccttatggggagatgagcaatcaggaggttatgaagagcattgaggatgggtaccggttgccccctcctgtggactgccctgcccctctgtatgagctcatgaagaactgctgggcatatgaccgtgcccgccggccacacttccagaagcttcaggcacatctggagcaactgcttgccaacccccactccctgcggaccattgccaactttgaccccagggtgactcttcgcctgcccagcctgagtggctcagatgggatcccatatcgaaccgtctctgagtggctcgagtccatacgcatgaaacgctacatcctgcacttccacttggctgggctggacaccatggagtgtgtgctggagctgaccgctgaggacctgacgcagatgggaatcacactgcccgggcaccagaagcgcattctttgcagtattcagggattcaaggactga

SEQ ID NO: 688 - DNA, 3027 bp, Homo sapiens
atggagacctgcgccggtccacacccgctgcgcctcttcctctgccggatgcagctctgtctcgcgctgcttttgggaccctggcggcctgggaccgccgaggaagttatcctcctggattccaaagcctcccaggccgagctgggctggactgcactgccaagtaatgggtgggaggagatcagcggcgtggatgaacacgaccgtcccatccgcacgtaccaagtgtgcaatgtgctggagcccaaccaggacaactggctgcagactggctggataagccgtggccgcgggcagcgcatcttcgtggaactgcagttcacactccgtgactgcagcagcatccctggcgccgcgggtacctgcaaggagaccttcaacgtctactacctggaaactgaggccgacctgggccgtgggcgtccccgcctaggcggcagccggccccgcaaaatcgacacgatcgcggcggacgagagcttcacgcagggcgacctgggtgagcgcaagatgaagctgaacacagaggtgcgcgagatcggaccgctcagccggcggggtttccacctggcctttcaggacgtgggcgcatgcgtggcgcttgtctcggtgcgcgtctactacaagcagtgccgcgccaccgtgcggggcctggccacgttcccagccaccgcagccgagagcgccttctccacactggtggaagtggccggaacgtgcgtggcgcactcggaaggggagcctggcagccccccacgcatgcactgcggcgccgacggcgagtggctggtgcctgtgggccgctgcagctgcagcgcgggattccaggagcgtggtgacttctgcgaagcctgtcccccagggttttacaaggtgtccccgcggcggcccctctgctcaccgtgcccagagcacagccgggccctggaaaacgcctccaccttctgcgtgtgccaggacagctatgcgcgctcacccaccgacccgccctcggcttcctgcacccggccgccgtcggcgccgcgggacctgcagtacagcctgagccgctcgccgctggtgctgcgactgcgctggctgccgccggccgactcgggaggccgctcggacgtcacctactcgctgctgtgcctgcgctgcggccgcgagggcccggcgggcgcctgcgagccgtgcgggccgcgcgtggccttcctaccgcgccaggcagggctgcgggagcgagccgccacgctgctgcacctgcggcccggcgcgcgctacaccgtgcgcgtggccgcgctcaacggcgtctcgggcccggcggccgccgcgggaaccacctacgcgcaggtcaccgtctccaccgggcccggggcgccctgggaggagggtgagatccgcagggaccgagtggaaccccagagcgtgtccctgtcgtggcgggagcccatccctgccggagcccctggggccaatgacacggagtacgagatccgatactacgagaagggtcagagtgagcaggcttactccatggtgaagacaggggcgcccacagtcaccgtcaccaacctgaagccggctacccgctacgtctttcagatccgggccgcttccccggggccatcctgggaggcccagagttttaaccccagcattgaagtacagaccctgggggaggctgcctcagggtccagggaccagagccccgccattgtcgtcaccgtagtgaccatctcggccctcctcgtcctgggctccgtgatgagtgtgctggccatttggaggaggccctgcagctatggcaaaggaggaggggatgcccatgatgaagaggagctgtatttccacttcaaagtcccaacacgtcgcacattcctggacccccagagctgtggggacccgctgcaggctgtgcatctgttcgccaaggaactggatgcgaaaagcgtcacgctggagaggagccttggaggagggcggtttggggagctgtgctgtggctgcttgcagctccccggtcgccaggagctgctcgtagccgtgcatatgctgagggacagcgcctccgactcacagaggctcggcttcctggccgaggccctcacgctgggccagtttgaccatagccacatcgtgcggctggagggcgttgttacccgaggaagcaccttgatgattgtcaccgagtacatgagccatggggccctggacggcttcctcaggcggcacgaggggcagctggtggctgggcaactgatggggttgctgcctgggctggcatcagccatgaagtatctgtcagagatgggctacgttcaccggggcctggcagctcgccatgtgctggtcagcagcgaccttgtctgcaagatctctggcttcgggcggggcccccgggaccgatcagaggctgtctacaccactatgagtggccggagcccagcgctatgggccgctcccgagacacttcagtttggccacttcagctctgccagtgacgtgtggagcttcggcatcatcatgtgggaggtgatggcctttggggagcggccttactgggacatgtctggccaagacgtgatcaaggctgtggaggatggcttccggctgccaccccccaggaactgtcctaaccttctgcaccgactaatgctcgactgctggcagaaggacccaggtgagcggcccaggttctcccagatccacagcatcctgagcaagatggtgcaggacccagagccccccaagtgtgccctgactacctgtcccaggcctcccaccccactagcggaccgtgccttctccaccttcccctcctttggctctgtgggcgcgtggctggaggccctggacctgtgccgctacaaggacagcttcgcggctgctggctatgggagcctggaggccgtggccgagatgactgcccaggacctggtgagcctaggcatctctttggctgaacatcgagaggccctcctcagcgggatcagcgccctgcaggcacgagtgctccagctgcagggccagggggtgcaggtgtga

SEQ ID NO: 689 - DNA, 3027 bp, Homo sapiens
atggagacctgcgccggtccacacccgctgcgcctcttcctctgccggatgcagctctgtctcgcgctgcttttgggaccctggcggcctgggaccgccgaggaagttatcctcctggattccaaagcctcccaggccgagctgggctggactgcactgccaagtaatgggtgggaggagatcagcggcgtggatgaacacgaccgtcccatccgcacgtaccaagtgtgcaatgtgctggagcccaaccaggacaactggctgcagactggctggataagccgtggccgcgggcagcgcatcttcgtggaactgcagttcacactccgtgactgcagcagcatccctggcgccgcgggtacctgcaaggagaccttcaacgtctactacctggaaactgaggccgacctgggccgtgggcgtccccgcctaggcggcagccggccccgcaaaatcgacacgatcgcggcggacgagagcttcacgcagggcgacctgggtgagcgcaagatgaagctgaacacagaggtgcgcgagatcggaccgctcagccggcggggtttccacctggcctttcaggacgtgggcgcatgcgtggcgcttgtctcggtgcgcgtctactacaagcagtgccgcgccaccgtgcggggcctggccacgttcccagccaccgcagccgagagcgccttctccacactggtggaagtggccggaacgtgcgtggcgcactcggaaggggagcctggcagccccccacgcatgcactgcggcgccgacggcgagtggctggtgcctgtgggccgctgcagctgcagcgcgggattccaggagcgtggtgacttctgcgaagcctgtcccccagggttttacaaggtgtccccgcggcggcccctctgctcaccgtgcccagagcacagccgggccctggaaaacgcctccaccttctgcgtgtgccaggacagctatgcgcgctcacccaccgacccgccctcggcttcctgcacccggccgccgtcggcgccgcgggacctgcagtacagcctgagccgctcgccgctggtgctgcgactgcgctggctgccgccggccgactcgggaggccgctcggacgtcacctactcgctgctgtgcctgcgctgcggccgcgagggcccggcgggcgcctgcgagccgtgcgggccgcgcgtggccttcctaccgcgccaggcagggctgcgggagcgagccgccacgctgctgcacctgcggcccggcgcgcgctacaccgtgcgcgtggccgcgctcaacggcgtctcgggcccggcggccgccgcgggaaccacctacgcgcaggtcaccgtctccaccgggcccggggcgccctgggaggagggtgagatccgcagggaccgagtggaaccccagagcgtgtccctgtcgtggcgggagcccatccctgccggagcccctggggccaatgacacggagtacgagatccgatactacgagaagggtcagagtgagcaggcttactccatggtgaagacaggggcgcccacagtcaccgtcaccaacctgaagccggctacccgctacgtctttcagatccgggccgcttccccggggccatcctgggaggcccagagttttaaccccagcattgaagtacagaccctgggggaggctgcctcagggtccagggaccagagccccgccattgtcgtcaccgtagtgaccatctcggccctcctcgtcctgggctccgtgatgagtgtgctggccatttggaggaggccctgcagctatggcaaaggaggaggggatgcccatgatgaagaggagctgtatttccacttcaaagtcccaacacgtcgcacattcctggacccccagagctgtggggacctgctgcaggctgtgcatctgttcgccaaggaactggatgcgaaaagcatcacgctggagaggagccttggaggagggcggtttggggagctgtgctgtggctgcttgcagctccccggtcgccaggagctgctcgtagccgtgcatatgctgagggacagcgcctccgactcacagaggctcggcttcctggccgaggccctcacgctgggccagtttgaccatagccacatcgtgcggctggagggcgttgttacccgaggaagcaccttgatgattgtcaccgagtacatgagccatggggccctggacggcttcctcaggcggcacgaggggcagctggtggctgggcaactgatggggttgctgcctgggctggcatcagccatgaagtatctgtcagagatgggctacgttcaccggggcctggcagctcgccatgtgctggtcagcagcgaccttgtctgcaagatctctggcttcgggcggggcccccgggaccgatcagaggctgtctacaccactatgagtggccggagcccagcgctatgggccgctcccgagacacttcagtttggccacttcagctctgccagtgacgtgtggagcttcggcatcatcatgtgggaggtgatggcctttggggagcggccttactgggacatgtctggccaagacgtgatcaaggctgtggaggatggcttccggctgccaccccccaggaactgtcctaaccttctgcaccgactaatgctcgactgctggcagaaggacccaggtgagcggcccaggttctcccagatccacagcatcctgagcaagatggtgcaggacccagagccccccaagtgtgccctgactacctgtcccaggcctcccaccccactagcggaccgtgccttctccaccttcccctcctttggctctgtgggcgcgtggctggaggccctggacctgtgccgctacaaggacagcttcgcggctgctggctatgggagcctggaggccgtggccgagatgactgcccaggacctggtgagcctaggcatctctttggctgaacatcgagaggccctcctcagcgggatcagcgccctgcaggcacgagtgctccagctgcagggccagggggtgcaggtgtga

SEQ ID NO: 690 - DNA, 3027 bp, Homo sapiens
atggagacctgcgccggtccacacccgctgcgcctcttcctctgccggatgcagctctgtctcgcgctgcttttgggaccctggcggcctgggaccgccgaggaagttatcctcctggattccaaagcctcccaggccgagctgggctggactgcactgccaagtaatgggtgggaggagatcagcggcgtggatgaacacgaccgtcccatccgcacgtaccaagtgtgcaatgtgctggagcccaaccaggacaactggctgcagactggctggataagccgtggccgcgggcagcgcatcttcgtggaactgcagttcacactccgtgactgcagcagcatccctggcgccgcgggtacctgcaaggagaccttcaacgtctactacctggaaactgaggccgacctgggccgtgggcgtccccgcctaggcggcagccggccccgcaaaatcgacacgatcgcggcggacgagagcttcacgcagggcgacctgggtgagcgcaagatgaagctgaacacagaggtgcgcgagatcggaccgctcagccggcggggtttccacctggcctttcaggacgtgggcgcatgcgtggcgcttgtctcggtgcgcgtctactacaagcagtgccgcgccaccgtgcggggcctggccacgttcccagccaccgcagccgagagcgccttctccacactggtggaagtggccggaacgtgcgtggcgcactcggaaggggagcctggcagccccccacgcatgcactgcggcgccgacggcgagtggctggtgcctgtgggccgctgcagctgcagcgcgggattccaggagcgtggtgacttctgcgaagcctgtcccccagggttttacaaggtgtccccgcggcggcccctctgctcaccgtgcccagagcacagccgggccctggaaaacgcctccaccttctgcgtgtgccaggacagctatgcgcgctcacccaccgacccgccctcggcttcctgcacccggccgccgtcggcgccgcgggacctgcagtacagcctgagccgctcgccgctggtgctgcgactgcgctggctgccgccggccgactcgggaggccgctcggacgtcacctactcgctgctgtgcctgcgctgcggccgcgagggcccggcgggcgcctgcgagccgtgcgggccgcgcgtggccttcctaccgcgccaggcagggctgcgggagcgagccgccacgctgctgcacctgcggcccggcgcgcgctacaccgtgcgcgtggccgcgctcaacggcgtctcgggcccggcggccgccgcgggaaccacctacgcgcaggtcaccgtctccaccgggcccggggcgccctgggaggagggtgagatccgcagggaccgagtggaaccccagagcgtgtccctgtcgtggcgggagcccatccctgccggagcccctggggccaatgacacggagtacgagatccgatactacgagaagggtcagagtgagcaggcttactccatggtgaagacaggggcgcccacagtcaccgtcaccaacctgaagccggctacccgctacgtctttcagatccgggccgcttccccggggccatcctgggaggcccagagttttaaccccagcattgaagtacagaccctgggggaggctgcctcagggtccagggaccagagccccgccattgtcgtcaccgtagtgaccatctcggccctcctcgtcctgggctccgtgatgagtgtgctggccatttggaggaggccctgcagctatggcaaaggaggaggggatgcccatgatgaagaggagctgtatttccacttcaaagtcccaacacgtcgcacattcctggacccccagagctgtggggacctgctgcaggctgtgcatctgttcgccaaggaactggatgcgaaaagcgtcacgctggagaggagccttggaggagggcggtttggggagctgtgctgtggctgcttgcagctccccggtcgccaggagctgctcgtagccgtgcatatgctgagggacagcgcctccgactcacagaggctcggcttcctggccgaggccctcacgctgggccagtttgaccatagccacatcgtgcggctggagggcgttgttacccgaggaagcaccttgatgattgtcaccgagtacatgagccatggggccctggacggcttcctcaggcggcacgaggggcagctggtggctgggcaactgatggagttgctgcctgggctggcatcagccatgaagtatctgtcagagatgggctacgttcaccggggcctggcagctcgccatgtgctggtcagcagcgaccttgtctgcaagatctctggcttcgggcggggcccccgggaccgatcagaggctgtctacaccactatgagtggccggagcccagcgctatgggccgctcccgagacacttcagtttggccacttcagctctgccagtgacgtgtggagcttcggcatcatcatgtgggaggtgatggcctttggggagcggccttactgggacatgtctggccaagacgtgatcaaggctgtggaggatggcttccggctgccaccccccaggaactgtcctaaccttctgcaccgactaatgctcgactgctggcagaaggacccaggtgagcggcccaggttctcccagatccacagcatcctgagcaagatggtgcaggacccagagccccccaagtgtgccctgactacctgtcccaggcctcccaccccactagcggaccgtgccttctccaccttcccctcctttggctctgtgggcgcgtggctggaggccctggacctgtgccgctacaaggacagcttcgcggctgctggctatgggagcctggaggccgtggccgagatgactgcccaggacctggtgagcctaggcatctctttggctgaacatcgagaggccctcctcagcgggatcagcgccctgcaggcacgagtgctccagctgcagggccagggggtgcaggtgtga

SEQ ID NO: 691 - DNA, 2931 bp, Homo sapiens
atggagctccaggcagcccgcgcctgcttcgccctgctgtggggctgtgcgctggccgcggccgcggcggcgcagggcaaggaagtggtactgctggactttgctgcagctggaggggagctcggctggctcacacacccgtatggcaaagggtgggacctgatgcagaacatcatgaatgacatgccgatctacatgtactccgtgtgcaacgtgatgtctggcgaccaggacaactggctccgcaccaactgggtgtaccgaggagaggctgagcgtatcttcattgagctcaagtttactgtacgtgactgcaacagcttccctggtggcgccagctcctgcaaggagactttcaacctctactatgccgagtcggacctggactacggcaccaacttccagaagcgcctgttcaccaagattgacaccattgcgcccgatgagatcaccgtcagcagcgacttcgaggcacgccacgtgaagctgaacgtggaggagcgctccgtggggccgctcacccgcaaaggcttctacctggccttccaggatatcggtgcctgtgtggcgctgctctccgtccgtgtctactacaagaagtgccccgagctgctgcagggcctggcccacttccctgagaccatcgccggctctgatgcaccttccctggccactgtggccggcacctgtgtggaccatgccgtggtgccaccggggggtgaagagccccgtatgcactgtgcagtggatggcgagtggctggtgcccattgggcagtgcctgtgccaggcaggctacgagaaggtggaggatgcctgccaggcctgctcgcctggattttttaagtttgaggcatctgagagcccctgcttggagtgccctgagcacacgctgccatcccctgagggtgccacctcctgcgagtgtgaggaaggcttcttccgggcacctcaggacccagcgtcgatgccttgcacacgacccccctccgccccacactacctcacagccgtgggcatgggtgccaaggtggagctgcgctggacgccccctcaggacagcgggggccgcgaggacattgtctacagcgtcacctgcgaacagtgctggcccgagtctggggaatgcgggccgtgtgaggccagtgtgcgctactcggagcctcctcacggactgacccgcaccagtgtgacagtgagcgacctggagccccacatgaactacaccttcaccgtggaggcccgcaatggcgtctcaggcctggtaaccagccgcagcttccgtactgccagtgtcagcatcaaccagacagagccccccaaggtgaggctggagggccgcagcaccacctcgcttagcgtctcctggagcatccccccgccgcagcagagccgagtgtggaagtacgaggtcacttaccgcaagaagggagactccaacagctacaatgtgcgccgcaccgagggtttctccgtgaccctggacgacctggccccagacaccacctacctggtccaggtgcaggcactgacgcaggagggccagggggccggcagcaaggtgcacgaattccagacgctgtccccggagggatctggcaacttggcggtgattggcggcgtggctgtcggtgtggtcctgcttctggtgctggcaggagttggcttctttatccaccgcaggaggaagaaccagcgtgcccgccagtccccggaggacgtttacttctccaagtcagaacaactgaagcccctgaagacatacgtggacccccacacatatgaggaccccaaccaggctgtgttgaagttcactaccgagatccatccatcctgtgtcactcggcagaaggtgatcggagcaggagagtttggggaggtgtacaagggcatgctgaagacatcctcggggaagaaggaggtgccggtggccatcaagacgctgaaagccggctacacagagaagcagcgagtggacttcctcggcgaggccggcatcatgggccagttcagccaccacaacatcatccgcctagagggcgtcatctccaaatacaagcccatgatgatcatcactgagtacatggagaatggggccctggacaagttccttcgggagaaggatggcgagttcagcgtgctgcagctggtgggcatgctgcggggcatcgcagctggcatgaagtacctggccaacatgaactatgtgcaccgtgacctggctgcccgcaacatcctcgtcaacagcaacctggtctgcaaggtgtctgactttggcctgtcccgcgtgctggaggacgaccccgaggccacctacaccaccagtggcggcaagatccccatccgctggaccgccccggaggccatttcctaccggaagttcacctctgccagcgacgtgtggagctttggcattgtcatgtgggaggtgatgacctatggcgagcggccctactgggagttgtccaaccacgaggtgatgaaagccatcaatgatggcttccggctccccacacccatggactgcccctccgccatctaccagctcatgatgcagtgctggcagcaggagcgtgcccgccgccccaagttcgctgacatcgtcagcatcctggacaagctcattcatgcccctgactccctcaagaccctggctgactttgacccccgcgtgtctatccggctccccagcacgagcggctcggagggggtgcccttccgcacggtgtccgagtggctggagtccatcaagatgcagcagtatacggagcacttcatggcggccggctacactgccatcgagaaggtggtgcagatgaccaacgacgacatcaagaggattggggtgcggctgcccggccaccagaagcgcatcgcctacagcctgctgggactcaaggaccaggtgaacactgtggggatccccatctga

SEQ ID NO: 692 - DNA, 2952 bp, Homo sapiens
atggattgtcagctctccatcctcctccttctcagctgctctgttctcgacagcttcggggaactgattccgcagccttccaatgaagtcaatctactggattcaaaaacaattcaaggggagctgggctggatctcttatccatcacatgggtgggaagagatcagtggtgtggatgaacattacacacccatcaggacttaccaggtgtgcaatgtcatggaccacagtcaaaacaattggctgagaacaaactgggtccccaggaactcagctcagaagatttatgtggagctcaagttcactctacgagactgcaatagcattccattggttttaggaacttgcaaggagacattcaacctgtactacatggagtctgatgatgatcatggggtgaaatttcgagagcatcagtttacaaagattgacaccattgcagctgatgaaagtttcactcaaatggatcttggggaccgtattctgaagctcaacactgagattagagaagtaggtcctgtcaacaagaagggattttatttggcatttcaagatgttggtgcttgtgttgccttggtgtctgtgagagtatacttcaaaaagtgcccatttacagtgaagaatctggctatgtttccagacacggtacccatggactcccagtccctggtggaggttagagggtcttgtgtcaacaattctaaggaggaagatcctccaaggatgtactgcagtacagaaggcgaatggcttgtacccattggcaagtgttcctgcaatgctggctatgaagaaagaggttttatgtgccaagcttgtcgaccaggtttctacaaggcattggatggtaatatgaagtgtgctaagtgcccgcctcacagttctactcaggaagatggttcaatgaactgcaggtgtgagaataattacttccgggcagacaaagaccctccatccatggcttgtacccgacctccatcttcaccaagaaatgttatctctaatataaacgagacctcagttatcctggactggagttggcccctggacacaggaggccggaaagatgttaccttcaacatcatatgtaaaaaatgtgggtggaatataaaacagtgtgagccatgcagcccaaatgtccgcttcctccctcgacagtttggactcaccaacaccacggtgacagtgacagaccttctggcacatactaactacacctttgagattgatgccgttaatggggtgtcagagctgagctccccaccaagacagtttgctgcggtcagcatcacaactaatcaggctgctccatcacctgtcctgacgattaagaaagatcggacctccagaaatagcatctctttgtcctggcaagaacctgaacatcctaatgggatcatattggactacgaggtcaaatactatgaaaagcaggaacaagaaacaagttataccattctgagggcaagaggcacaaatgttaccatcagtagcctcaagcctgacactatatacgtattccaaatccgagcccgaacagccgctggatatgggacgaacagccgcaagtttgagtttgaaactagtccagactctttctccatctctggtgaaagtagccaagtggtcatgatcgccatttcagcggcagtagcaattattctcctcactgttgtcatctatgttttggttgggaggttctgtggctataagtcaaaacatggggcagatgaaaaaagacttcattttggcaatgggcatttaaaacttccaggtctcaggacttatgttgacccacatacatatgaagaccctacccaagctgttcatgagtttgccaaggaattggatgccaccaacatatccattgataaagttgttggagcaggtgaatttggagaggtgtgcagtggtcgcttaaaacttccttcaaaaaaagagatttcagtggccattaagaccctgaaagttggctacacagaaaagcagaggagagacttcctgggagaagcaagcattatgggacagtttgaccaccccaatatcattcgactggaaggagttgttaccaaaagtaagccagttatgattgtcacagaatacatggagaatggttccttggatagtttcctacgtaaacacgatgcccagtttactgtcattcagctagtggggatgcttcgagggatagcatctggcatgaagtacctgtcagacatgggctatgttcaccgagacctcgctgctcggaacatcttgatcaacagtaacttggtgtgtaaggtttctgatttcggactttcgcgtgtcctggaggatgacccagaagctgcttatacaacaagaggagggaagatcccaatcaggtggacatcaccagaagctatagcctaccgcaagttcacgtcagccagcgatgtatggagttatgggattgttctctgggaggtgatgtcttatggagagagaccatactgggagatgtccaatcaggatgtaattaaagctgtagatgagggctatcgactgccaccccccatggactgcccagctgccttgtatcagctgatgctggactgctggcagaaagacaggaacaacagacccaagtttgagcagattgttagtattctggacaagcttatccggaatcccggcagcctgaagatcatcaccagtgcagccgcaaggccatcaaaccttcttctggaccaaagcaatgtggatatcactaccttccgcacaacaggtgactggcttaatggtgtctggacagcacactgcaaggaaatcttcacgggtgtggagtacagttcttgtgacacaatagccaagatttccacagatgacatgaaaaaggttggtgtcaccgtggttgggccacagaagaagatcatcagtagcattaaagctctagaaacgcaatcaaagaatggcccagttcccgtgtaa

SEQ ID NO: 693 - DNA, 2952 bp, Homo sapiens
atggattgtcagctctccatcctcctccttctcagctgctctgttctcgacagcttcggggaactgattccgcagccttccaatgaagtcaatctactggattcaaaaacaattcaaggggagctgggctggatctcttatccatcacatgggtgggaagagatcagtggtgtggatgaacattacacacccatcaggacttaccaggtgtgcaatgtcatggaccacagtcaaaacaattggctgagaacaaactgggtccccaggaactcagctcagaagatttatgtggagctcaagttcactctacgagactgcaatagcattccattggttttaggaacttgcaaggagacattcaacctgtactacatggagtctgatgatgatcatggggtgaaatttcgagagcatcagtttacaaagattgacaccattgcagctgatgaaagtttcactcaaatggatcttggggaccgtattctgaagctcaacactgagattagagaagtaggtcctgtcaacaagaagggattttatttggcatttcaagatgttggtgcttgtgttgccttggtgtctgtgagagtatacttcaaaaagtgcccatttacagtgaagaatctggctatgtttccagacacggtacccatggactcccagtccctggtggaggttagagggtcttgtgtcaacaattctaaggaggaagatcctccaaggatgtactgcagtacagaaggcgaatggcttgtacccattggcaagtgttcctgcaatgctggctatgaagaaagaggttttatgtgccaagcttgtcgaccaggtttctacaaggcattggatggtaatatgaagtgtgctaagtgcccgcctcacagttctactcaggaagatggttcaatgaactgcaggtgtgagaataattacttccgggcagacaaagaccctccatccatggcttgtacccgacctccatcttcaccaagaaatgttatctctaatataaacgagacctcagttatcctggactggagttggcccctggacacaggaggccggaaagatgttaccttcaacatcatatgtaaaaaatgtgggtggaatataaaacagtgtgagccatgcagcccaaatgtccgcttcctccctcgacagtttggactcaccaacaccacggtgacagtgacagaccttctggcacatactaactacacctttgagattgatgccgttaatggggtgtcagagctgagctccccaccaagacagtttgctgcggtcagcatcacaactaatcaggctgctccatcacctgtcctgacgattaagaaagatcggacctccagaaatagcatctctttgtcctggcaagaacctgaacatcctaatgggatcatattggactacgaggtcaaatactatgaaaagcaggaacaagaaacaagttataccattctgagggcaagaggcacaaatgttaccatcagtagcctcaagcctgacactatatacgtattccaaatccgagcccgaacagccgctggatatgggacgaacagccgcaagtttgagtttgaaactagtccagactctttctccatctctggtgaaagtagccaagtggtcatgatcgccatttcagcggcagtagcaattattctcctcactgttgtcatctatgttttgattgggaggttctgtggctataagtcaaaacatggggcagatgaaaaaagacttcattttggcaatgggcatttaaaacttccaggtctcaggacttatgttgacccacatacatatgaagaccctacccaagctgttcatgagtttgccaaggaattggatgccaccaacatatccattgataaagttgttggagcaggtgaatttggagaggtgtgcagtggtcgcttaaaacttccttcaaaaaaagagatttcagtggccattaagaccctgaaagttggctacacagaaaagcagaggagagacttcctgggagaagcaagcattatgggacagtttgaccaccccaatatcattcgactggaaggagttgttaccaaaagtaagccagttatgattgtcacagaatacatggagaatggttccttggatagtttcctacgtaaacacgatgcccagtttactgtcattcagctagtggggatgcttcgagggatagcatctggcatgaagtacctgtcagacatgggctatgttcaccgagacctcgctgctcggaacatcttgatcaacagtaacttggtgtgtaaggtttctgatttcggactttcgcgtgtcctggaggatgacccagaagctgcttatacaacaagaggagggaagatcccaatcaggtggacatcaccagaagctatagcctaccgcaagttcacgtcagccagcgatgtatggagttatgggattgttctctgggaggtgatgtcttatggagagagaccatactgggagatgtccaatcaggatgtaattaaagctgtagatgagggctatcgactgccaccccccatggactgcccagctgccttgtatcagctgatgctggactgctggcagaaagacaggaacaacagacccaagtttgagcagattgttagtattctggacaagcttatccggaatcccggcagcctgaagatcatcaccagtgcagccgcaaggccatcaaaccttcttctggaccaaagcaatgtggatatcactaccttccacacaacaggtgactggcttaatggtgtctggacagcacactgcaaggaaatcttcacgggtgtggagtacagttcttgtgacacaatagccaagatttccacagatgacatgaaaaaggttggtgtcaccgtggttgggccacagaagaagatcatcagtagcattaaagctctagaaacgcaatcaaagaatggcccagttcccgtgtaa

SEQ ID NO: 694 - DNA, 2952 bp, Homo sapiens
atggattgtcagctctccatcctcctccttctcagctgctctgttctcgacagcttcggggaactgattccgcagccttccaatgaagtcaatctactggattcaaaaacaattcaaggggagctgggctggatctcttatccatcacatgggtgggaagagatcagtggtgtggatgaacattacacacccatcaggacttaccaggtgtgcaatgtcatggaccacagtcaaaacaattggctgagaacaaactgggtccccaggaactcagctcagaagatttatgtggagctcaagttcactctacgagactgcaatagcattccattggttttaggaacttgcaaggagacattcaacctgtactacatggagtctgatgatgatcatggggtgaaatttcgagagcatcagtttacaaagattgacaccattgcagctgatgaaagtttcactcaaatggatcttggggaccgtattctgaagctcaacactgagattagagaagtaggtcctgtcaacaagaagggattttatttggcatttcaagatgttggtgcttgtgttgccttggtgtctgtgagagtatacttcaaaaagtgcccatttacagtgaagaatctggctatgtttccagacacggtacccatggactcccagtccctggtggaggttagagggtcttgtgtcaacaattctaaggaggaagatcctccaaggatgtactgcagtacagaaggcgaatggcttgtacccattggcaagtgttcctgcaatgctggctatgaagaaagaggttttatgtgccaagcttgtcgaccaggtttctacaaggcattggatggtaatatgaagtgtgctaagtgcccgcctcacagttctactcaggaagatggttcaatgaactgcaggtgtgagaataattacttccgggcagacaaagaccctccatccatggcttgtacccgacctccatcttcaccaagaaatgttatctctaatataaacgagacctcagttatcctggactggagttggcccctggacacaggaggccggaaagatgttaccttcaacatcatatgtaaaaaatgtgggtggaatataaaacagtgtgagccatgcagcccaaatgtccgcttcctccctcgacagtttggactcaccaacaccacggtgacagtgacagaccttctggcacatactaactacacctttgagattgatgccgttaatggggtgtcagagctgagctccccaccaagacagtttgctgcggtcagcatcacaactaatcaggctgctccatcacctgtcctgacgattaagaaagatcggacctccagaaatagcatctctttgtcctggcaagaacctgaacatcctaatgggatcatattggactacgaggtcaaatactatgaaaagcaggaacaagaaacaagttataccattctgagggcaagaggcacaaatgttaccatcagtagcctcaagcctgacactatatacgtattccaaatccgagcccgaacagccgctggatatgggacgaacagccgcaagtttgagtttgaaactagtccagactctttctccatctctggtgaaagtagccaagtggtcatgatcgccatttcagcggcagtagcaattattctcctcactgttgtcatctatgttttgattgggaggttctgtggctataagtcaaaacatggggcagatgaaaaaagacttcattttggcaatgggcatttaaaacttccaggtctcaggacttatgttgacccacatacatatgaagaccctacccaagctgttcatgagtttgccaaggaattggatgccaccaacatatccattgataaagttgttggagcaggtgaatttggagaggtgtgcagtggtcgcttaaaacttccttcaaaaaaagagatttcagtggccattaagaccctgaaagttggctacacagaaaagcagaggagagacttcctgggagaagcaagcattatgggacagtttgaccaccccaatatcattcgactggaaggagttgttaccaaaagtaagccagttatgattgtcacagaatacatggagaatggttccttggatagtttcctacgtaaacacgatgcccagtttactgtcattcagctagtggggatgcttcgagggatagcatctggcatgaagtacctgtcagacatgggctatgttcaccgagacctcgctgctcggaacatcttgatcaacagtaacttggtgtgtaaggtttctgatttcggactttcgcgtgtcctggaggatgacccagaagctgcttatacaacaagaggagggaagatcccaatcaggtggacatcaccagaagctatagcctaccgcaagttcacgtcagccagcgatgtatggagttatgggattgttctctgggaggtgatgtcttatggagagagaccatactgggagatgtccaatcaggatgtaattaaagctgtagatgagggctatcgactgccaccccccatggactgcccagctgccttgtatcagctgatgctggactgctggcagaaagacaggaacaacagacccaagtttgagcagattgttagtattctggacaagcttatccggaatcccggcagcctgaagatcatcaccagtgcagccgcaaggccatcaaaccttcttctggaccaaagcaatgtggatatcactaccttccgcacaacaggtgactggcttaatggtgtccggacagcacactgcaaggaaatcttcacgggtgtggagtacagttcttgtgacacaatagccaagatttccacagatgacatgaaaaaggttggtgtcaccgtggttgggccacagaagaagatcatcagtagcattaaagctctagaaacgcaatcaaagaatggcccagttcccgtgtaa

SEQ ID NO: 695 - DNA, 2997 bp, Homo sapiens
atggtttttcaaactcggtacccttcatggattattttatgctacatctggctgctccgctttgcacacacaggggaggcgcaggctgcgaaggaagtactactgctggattctaaagcacaacaaacagagttggagtggatttcctctccacccaatgggtgggaagaaattagtggtttggatgagaactataccccgatacgaacataccaggtgtgccaagtcatggagcccaaccaaaacaactggctgcggactaactggatttccaaaggcaatgcacaaaggatttttgtagaattgaaattcaccctgagggattgtaacagtcttcctggagtactgggaacttgcaaggaaacatttaatttgtactattatgaaacagactatgacactggcaggaatataagagaaaacctctatgtaaaaatagacaccattgctgcagatgaaagttttacccaaggtgaccttggtgaaagaaagatgaagcttaacactgaggtgagagagattggacctttgtccaaaaagggattctatcttgcctttcaggatgtaggggcttgcatagctttggtttctgtcaaagtgtactacaagaagtgctggtccattgttgagaacttagctatctttccagatacagtgactggttcagaattttcctctttagtcgaggttcgagggacatgtgtcagcagtgcagaggaagaagcggaaaacgcccccaggatgcactgcagtgcagaaggagaatggttagtgcccattggaaaatgtatctgcaaagcaggctaccagcaaaaaggagacacttgtgaaccctgtggccgtgggttctacaagtcttcctctcaagatcttcagtgctctcgttgtccaactcacagtttttctgataaagaaggctcctccagatgtgaatgtgaagatgggtattacagggctccatctgacccaccatacgttgcatgcacaaggcctccatctgcaccacagaacctcattttcaacatcaaccaaaccacagtaagtttggaatggagtcctcctgcagacaatgggggaagaaacgatgtgacctacagaatattgtgtaagcggtgcagttgggagcagggcgaatgtgttccctgtgggagtaacattggatacatgccccagcagactggattagaggataactatgtcactgtcatggacctgctagcccacgctaattatacttttgaagttgaagctgtaaatggagtttctgacttaagccgatcccagaggctctttgctgctgtcagtatcaccactggtcaagcagctccctcgcaagtgagcggagtaatgaaggagagagtactgcagcggagtgtcgagctttcctggcaggaaccagagcatcccaatggagtcatcacagaatatgaaatcaagtattacgagaaagatcaaagggaacggacctactcaacagtaaaaaccaagtctacttcagcctccattaataatctgaaaccaggaacagtgtatgttttccagattcgggcttttactgctgctggttatggaaattacagtcccagacttgatgttgctacactagaggaagctacaggtaaaatgtttgaagctacagctgtctccagtgaacagaatcctgttattatcattgctgtggttgctgtagctgggaccatcattttggtgttcatggtctttggcttcatcattgggagaaggcactgtggttatagcaaagctgaccaagaaggcgatgaagagctttactttcattttaaatttccaggcaccaaaacctacattgaccctgaaacctatgaggacccaaatagagctgtccatcaattcgccaaggagctagatgcctcctgtattaaaattgagcgtgtgattggtgcaggagaattcggtgaagtctgcagtggccgtttgaaacttccagggaaaagagatgttgcagtagccataaaaaccctgaaagttggttacacagaaaaacaaaggagagactttttgtgtgaagcaagcatcatggggcagtttgaccacccaaatgttgtccatttggaaggggttgttacaagagggaaaccagtcatgatagtaatagagttcatggaaaatggagccctagatgcatttctcaggaaacatgatgggcaatttacagtcattcagttagtaggaatgctgagaggaattgctgctggaatgagatatttggctgatatgggatatgttcacagggaccttgcagctcgcaatattcttgtcaacagcaatctcgtttgtaaagtgtcagattttggcctgtcccgagttatagaggatgatccagaagctgtctatacaactactggtggaaaaattccagtaaggtggacagcacccgaagccatccagtaccggaaattcacatcagccagtgatgtatggagctatggaatagtcatgtgggaagttatgtcttatggagaaagaccttattgggacatgtcaaatcaagatgttataaaagcaatagaagaaggttatcgtttaccagcacccatggactgcccagctggccttcaccagctaatgttggattgttggcaaaaggagcgtgctgaaaggccaaaatttgaacagatagttggaattctagacaaaatgattcgaaacccaaatagtctgaaaactcccctgggaacttgtagtaggccaataagccctcttctggatcaaaacactcctgatttcactaccttttgttcagttggagaatggctacaagctattaagatggaaagatataaagataatttcacggcagctggctacaattcccttgaatcagtagccaggatgactattgaggatgtgatgagtttagggatcacactggttggtcatcaaaagaaaatcatgagcagcattcagactatgagagcacaaatgctacatttacatggaactggcattcaagtgtga

SEQ ID NO: 696 - DNA, 2961 bp, Homo sapiens
atggctctgcggaggctgggggccgcgctgctgctgctgccgctgctcgccgccgtggaagaaacgctaatggactccactacagcgactgctgagctgggctggatggtgcatcctccatcagggtgggaagaggtgagtggctacgatgagaacatgaacacgatccgcacgtaccaggtgtgcaacgtgtttgagtcaagccagaacaactggctacggaccaagtttatccggcgccgtggcgcccaccgcatccacgtggagatgaagttttcggtgcgtgactgcagcagcatccccagcgtgcctggctcctgcaaggagaccttcaacctctattactatgaggctgactttgactcggccaccaagaccttcgccaactggatggagaatccatgggtgaaggtggataccattgcagccgacgagagcttctcccaggtggacctgggtggccgcgtcatgaaaatcaacaccgaggtgcggagcttcggacctgtgtcccgcagcggcttctacctggccttccaggactatggcggctgcatgtccctcatcgccgtgcgtgtcttctaccgcaagtgcccccgcatcatccagaatggcgccatcttccaggaaaccctgtcgggggctgagagcacatcgctggtggctgcccggggcagctgcatcgccaatgcggaagaggtggatgtacccatcaagctctactgtaacggggacggcgagtggctggtgcccatcgggcgctgcatgtgcaaagcaggcttcgaggccgttgagaatggcaccgtctgccgaggttgtccatctgggactttcaaggccaaccaaggggatgaggcctgtacccactgtcccatcaacagccggaccacttctgaaggggccaccaactgtgtctgccgcaatggctactacagagcagacctggaccccctggacatgccctgcacaaccatcccctccgcgccccaggctgtgatttccagtgtcaatgagacctccctcatgctggagtggacccctccccgcgactccggaggccgagaggacctcgtctacaacatcatctgcaagagctgtggctcgggccggggtgcctgcacccgctgcggggacaatgtacagtacgcaccacgccagctaggcctgaccgagccacgcatttacatcagtgacctgctggcccacacccagtacaccttcgagatccaggctgtgaacggcgttactgaccagagccccttctcgcctcagttcgcctctgtgaacatcaccaccaaccaggcagctccatcggcagtgtccatcatgcatcaggtgagccgcaccgtggacagcattaccctgtcgtggtcccagccggaccagcccaatggcgtgatcctggactatgagctgcagtactatgagaaggagctcagtgagtacaacgccacagccataaaaagccccaccaacacggtcaccgtgcagggcctcaaagccggcgccatctatgtcttccaggtgcgggcacgcaccgtggcaggctacgggcgctacagcggcaagatgtacttccagaccatgacagaagccgagtaccagacaagcatccaggagaagttgccactcatcatcggctcctcggccgctggcctggtcttcctcattgctgtggttgtcatcgccatcgtgtgtaacagacgggggtttgagcgtgctgactcggagtacacggacaagctgcaacactacaccagtggccacatgaccccaggcatgaagatctacatcgatcctttcacctacgaggaccccaacgaggcagtgcgggagtttgccaaggaaattgacatctcctgtgtcaaaattgagcaggtgatcggagcaggggagtttggcgaggtctgcagtggccacctgaagctgccaggcaagagagagatctttgtggccatcaagacgctcaagtcgggctacacggagaagcagcgccgggacttcctgagcgaagcctccatcatgggccagttcgaccatcccaacgtcatccacctggagggtgtcgtgaccaagagcacacctgtgatgatcatcaccgagttcatggagaatggctccctggactcctttctccggcaaaacgatgggcagttcacagtcatccagctggtgggcatgcttcggggcatcgcagctggcatgaagtacctggcagacatgaactatgttcaccgtgacctggctgcccgcaacatcctcgtcaacagcaacctggtctgcaaggtgtcggactttgggctctcacgctttctagaggacgatacctcagaccccacctacaccagtgccctgggcggaaagatccccatccgctggacagccccggaagccatccagtaccggaagttcacctcggccagtgatgtgtggagctacggcattgtcatgtgggaggtgatgtcctatggggagcggccctactgggacatgaccaaccaggatgtaatcaatgccattgagcaggactatcggctgccaccgcccatggactgcccgagcgccctgcaccaactcatgctggactgttggcagaaggaccgcaaccaccggcccaagttcggccaaattgtcaacacgctagacaagatgatccgcaatcccaacagcctcaaagccatggcgcccctctcctctggcatcaacctgccgctgctggaccgcacgatccccgactacaccagctttaacacggtggacgagtggctggaggccatcaagatggggcagtacaaggagagcttcgccaatgccggcttcacctcctttgacgtcgtgtctcagatgatgatggaggacattctccgggttggggtcactttggctggccaccagaaaaaaatcctgaacagtatccaggtgatgcgggcgcagatgaaccagattcagtctgtggaggtttga

SEQ ID NO: 697 - DNA, 2997 bp, Homo sapiens
atggccagagcccgcccgccgccgccgccgtcgccgccgccggggcttctgccgctgctccctccgctgctgctgctgccgctgctgctgctgcccgccggctgccgggcgctggaagagaccctcatggacacaaaatgggtaacatctgagttggcgtggacatctcatccagaaagtgggtgggaagaggtgagtggctacgatgaggccatgaatcccatccgcacataccaggtgtgtaatgtgcgcgagtcaagccagaacaactggcttcgcacggggttcatctggcggcgggatgtgcagcgggtctacgtggagctcaagttcactgtgcgtgactgcaacagcatccccaacatccccggctcctgcaaggagaccttcaacctcttctactacgaggctgacagcgatgtggcctcagcctcctcccccttctggatggagaacccctacgtgaaagtggacaccattgcacccgatgagagcttctcgcggctggatgccggccgtgtcaacaccaaggtgcgcagctttgggccactttccaaggctggcttctacctggccttccaggaccagggcgcctgcatgtcgctcatctccgtgcgcgccttctacaagaagtgtgcatccaccaccgcaggcttcgcactcttccccgagaccctcactggggcggagcccacctcgctggtcattgctcctggcacctgcatccctaacgccgtggaggtgtcggtgccactcaagctctactgcaacggcgatggggagtggatggtgcctgtgggtgcctgcacctgtgccaccggccatgagccagctgccaaggagtcccagtgccgcccctgtccccctgggagctacaaggcgaagcagggagaggggccctgcctcccatgtccccccaacagccgtaccacctccccagccgccagcatctgcacctgccacaataacttctaccgtgcagactcggactctgcggacagtgcctgtaccaccgtgccatctccaccccgaggtgtgatctccaatgtgaatgaaacctcactgatcctcgagtggagtgagccccgggacctgggtggccgggatgacctcctgtacaatgtcatctgcaagaagtgccatggggctggaggggcctcagcctgctcacgctgtgatgacaacgtggagtttgtgcctcggcagctgggcctgacggagcgccgggtccacatcagccatctgctggcccacacgcgctacacctttgaggtgcaggcggtcaacggtgtctcgggcaagagccctctgccgcctcgttatgcggccgtgaatatcaccacaaaccaggctgccccgtctgaagtgcccacactacgcctgcacagcagctcaggcagcagcctcaccctatcctgggcacccccagagcggcccaacggagtcatcctggactacgagatgaagtactttgagaagagcgagggcatcgcctccacagtgaccagccagatgaactccgtgcagctggacgggcttcggcctgacgcccgctatgtggtccaggtccgtgcccgcacagtagctggctatgggcagtacagccgccctgccgagtttgagaccacaagtgagagaggctctggggcccagcagctccaggagcagcttcccctcatcgtgggctccgctacagctgggcttgtcttcgtggtggctgtcgtggtcatcgctatcgtctgcctcaggaagcagcgacacggctctgattcggagtacacggagaagctgcagcagtacattgctcctggaatgaaggtttatattgacccttttacctacgaggaccctaatgaggctgttcgggagtttgccaaggagatcgacgtgtcctgcgtcaagatcgaggaggtgatcggagctggggaatttggggaagtgtgccgtggtcgactgaaacagcctggccgccgagaggtgtttgtggccatcaagacgctgaaggtgggctacaccgagaggcagcggcgggacttcctaagcgaggcctccatcatgggtcagtttgatcaccccaatataatccggctcgagggcgtggtcaccaaaagtcggccagttatgatcctcactgagttcatggaaaactgcgccctggactccttcctccggctcaacgatgggcagttcacggtcatccagctggtgggcatgttgcggggcattgctgccggcatgaagtacctgtccgagatgaactatgtgcaccgcgacctggctgctcgcaacatccttgtcaacagcaacctggtctgcaaagtctcagactttggcctctcccgcttcctggaggatgacccctccgatcctacctacaccagttccctgggcgggaagatccccatccgctggactgccccagaggccatagcctatcggaagttcacttctgctagtgatgtctggagctacggaattgtcatgtgggaggtcatgagctatggagagcgaccctactgggacatgagcaaccaggatgtcatcaatgccgtggagcaggattaccggctgccaccacccatggactgtcccacagcactgcaccagctcatgctggactgctgggtgcgggaccggaacctcaggcccaaattctcccagattgtcaataccctggacaagctcatccgcaatgctgccagcctcaaggtcattgccagcgctcagtctggcatgtcacagcccctcctggaccgcacggtcccagattacacaaccttcacgacagttggtgattggctggatgccatcaagatggggcggtacaaggagagcttcgtcagtgcggggtttgcatcttttgacctggtggcccagatgacggcagaagacctgctccgtattggggtcaccctggccggccaccagaagaagatcctgagcagtatccaggacatgcggctgcagatgaaccagacgctgcctgtgcaggtctga

SEQ ID NO: 698 - DNA, 3021 bp, Homo sapiens
atggtgtgtagcctatgggtgctgctcctggtgtcttcagttctggctctggaagaggtattgctggacaccaccggagagacatctgagattggctggctcacctacccaccaggggggtgggacgaggtgagtgttctggacgaccagcgacgcctgactcggacctttgaggcatgtcatgtggcaggggcccctccaggcaccgggcaggacaattggttgcagacacactttgtggagcggcgcggggcccagagggcgcacattcgactccacttctctgtgcgggcatgctccagcctgggtgtgagcggcagcacctgccgggagaccttcaccctttactaccgtcaggctgaggagcccgacagccctgacagcgtttcctcctggcacctcaaacgctggaccaaggtggacacaattgcagcagacgagagctttccctcctcctcctcctcctcctcctcttcttcctctgcagcgtgggctgtgggaccccacggggctgggcagcgggctggactgcaactgaacgtcaaagagcggagctttgggcctctcacccaacgcggcttctacgtggccttccaggacacgggggcctgcctggccctggtcgctgtcaggctcttctcctacacctgccctgccgtgctccgatcctttgcttcctttccagagacgcaggccagtggggctgggggggcctccctggtggcagctgtgggcacctgtgtggctcatgcagagccagaggaggatggagtagggggccaggcaggaggcagcccccccaggctgcactgcaacggggagggcaagtggatggtagctgtcgggggctgccgctgccagcctggataccaaccagcacgaggagacaaggcctgccaagcctgcccacgggggctctataagtcttctgctgggaatgctccctgctcaccatgccctgcccgcagtcacgctcccaacccagcagcccccgtttgcccctgcctggagggcttctaccgggccagttccgacccaccagaggccccctgcactggtcctccatcggctccccaggagctttggtttgaggtgcaaggctcagcactcatgctacactggcgcctgcctcgggagctggggggtcgaggggacctgctcttcaatgtcgtgtgcaaggagtgtgaaggccgccaggaacctgccagcggtggtgggggcacttgtcaccgctgcagggatgaggtccacttcgaccctcgccagagaggcctgactgagagccgagtgttagtggggggactccgggcacacgtaccctacatcttagaggtgcaggctgttaatggggtgtctgagctcagccctgaccctcctcaggctgcagccatcaatgtcagcaccagccatgaagtgccctctgctgtccctgtggtgcaccaggtgagccgggcatccaacagcatcacggtgtcctggccgcagcccgaccagaccaatgggaacatcctggactatcagctccgctactatgaccaggcagaagacgaatcccactccttcaccctgaccagcgagaccaacactgccaccgtgacacagctgagccctggccacatctatggtttccaggtgcgggcccggactgctgccggccacggcccctacgggggcaaagtctatttccagacacttcctcaaggggagctgtcttcccagcttccggaaagactctccttggtgatcggctccatcctgggggctttggccttcctcctgctggcagccatcaccgtgctggcggtcgtcttccagcggaagcggcgtgggactggctacacggagcagctgcagcaatacagcagcccaggactcggggtgaagtattacatcgacccctccacctacgaggacccctgtcaggccatccgagaacttgcccgggaagtcgatcctgcttatatcaagattgaggaggtcattgggacaggctcttttggagaagtgcgccagggccgcctgcagccacggggacggagggagcagactgtggccatccaggccctgtgggccgggggcgccgaaagcctgcagatgaccttcctgggccgggccgcagtgctgggtcagttccagcaccccaacatcctgcggctggagggcgtggtcaccaagagccgacccctcatggtgctgacggagttcatggagcttggccccctggacagcttcctcaggcagcgggagggccagttcagcagcctgcagctggtggccatgcagcggggagtggctgctgccatgcagtacctgtccagctttgccttcgtccatcgctcgctgtctgcccacagcgtgctggtgaatagccacttggtgtgcaaggtggcccgtcttggccacagtcctcagggcccaagttgtttgcttcgctgggcagccccagaggtcattgcacatggaaagcatacaacatccagtgatgtctggagctttgggatactcatgtgggaagtgatgagttatggagaacggccttactgggacatgagtgagcaggaggtactaaatgcaatagagcaggagttccggctgcccccgcctccaggctgtcctcctggattacatctacttatgttggacacttggcagaaggaccgtgcccggcggcctcattttgaccagctggtggctgcatttgacaagatgatccgcaagccagataccctgcaggctggcggggacccaggggaaaggccttcccaggcccttctgacccctgtggccctggactttccttgtctggactcaccccaggcctggctttcagccattggactggagtgctaccaggacaacttctccaagtttggcctctgtaccttcagtgatgtggctcagctcagcctagaagacctgcctgccctgggcatcaccctggctggccaccagaagaagctgctgcaccacatccagctccttcagcaacacctgaggcagcagggctcagtggaggtctga

SEQ ID NO: 699 - DNA, 3021 bp, Homo sapiens
atggtgtgtagcctatgggtgctgctcctggtgtcttcagttctggctctggaagaggtattgctggacaccaccggagagacatctgagattggctggctcacctacccaccaggggggtgggacgaggtgagtgttctggacgaccagcgacgcctgactcggacctttgaggcatgtcatgtggcaggggcccctccaggcaccgggcaggacaattggttgcagacacactttgtggagcggcgcggggcccagagggcgcacattcgactccacttctctgtgcgggcatgctccagcctgggtgtgagcggcggcacctgccgggagaccttcaccctttactaccgtcaggctgaggagcccgacagccctgacagcgtttcctcctggcacctcaaacgctggaccaaggtggacacaattgcagcagacgagagctttccctcctcctcctcctcctcctcctcttcttcctctgcagcgtgggctgtgggaccccacggggctgggcagcgggctggactgcaactgaacgtcaaagagcggagctttgggcctctcacccaacgcggcttctacgtggccttccaggacacgggggcctgcctggccctggtcgctgtcaggctcttctcctacacctgccctgccgtgctccgatcctttgcttcctttccagagacgcaggccagtggggctgggggggcctccctggtggcagctgtgggcacctgtgtggctcatgcagagccagaggaggatggagtagggggccaggcaggaggcagcccccccaggctgcactgcaacggggagggcaagtggatggtagctgtcgggggctgccgctgccagcctggataccaaccagcacgaggagacaaggcctgccaagcctgcccacgggggctctataaggcttctgctgggaatgctccctgctcaccatgccctgcccgcagtcacgctcccaacccagcagcccccgtttgcccctgcctggagggcttctaccgggccagttccgacccaccagaggccccctgcactggtcctccatcggctccccaggagctttggtttgaggtgcaaggctcagcactcatgctacactggcgcctgcctcgggagctggggggtcgaggggacctgctcttcaatgtcgtgtgcaaggagtgtgaaggccgccaggaacctgccagcggtggtgggggcacttgtcaccgctgcagggatgaggtccacttcgaccctcgccagagaggcctgactgagagccgagtgttagtggggggactccgggcacacgtaccctacatcttagaggtgcaggctgttaatggggtgtctgagctcagccctgaccctcctcaggctgcagccatcaatgtcagcaccagccatgaagtgccctctgctgtccctgtggtgcaccaggtgagccgggcatccaacagcatcacggtgtcctggccgcagcccgaccagaccaatgggaacatcctggactatcagctccgctactatgaccaggcagaagacgaatcccactccttcaccctgaccagcgagaccaacactgccaccgtgacacagctgagccctggccacatctatggtttccaggtgcgggcccggactgctgccggccacggcccctacgggggcaaagtctatttccagacacttcctcaaggggagctgtcttcccagcttccggaaagactctccttggtgatcggctccatcctgggggctttggccttcctcctgctggcagccatcaccgtgctggcggtcgtcttccagcggaagcggcgtgggactggctacacggagcagctgcagcaatacagcagcccaggactcggggtgaagtattacatcgacccctccacctacgaggacccctgtcaggccatccgagaacttgcccgggaagtcgatcctgcttatatcaagattgaggaggtcattgggacaggctcttttggagaagtgcgccagggccgcctgcagccacggggacggagggagcagactgtggccatccaggccctgtgggccgggggcgccgaaagcctgcagatgaccttcctgggccgggccgcagtgctgggtcagttccagcaccccaacatcctgcggctggagggcgtggtcaccaagagccgacccctcatggtgctgacggagttcatggagcttggccccctggacagcttcctcaggcagcgggagggccagttcagcagcctgcagctggtggccatgcagcggggagtggctgctgccatgcagtacctgtccagctttgccttcgtccatcgctcgctgtctgcccacagcgtgctggtgaatagccacttggtgtgcaaggtggcccgtcttggccacagtcctcagggcccaagttgtttgcttcgctgggcagccccagaggtcattgcacatggaaagcatacaacatccagtgatgtctggagctttgggatactcatgtgggaagtgatgagttatggagaacggccttactgggacatgagtgagcaggaggtactaaatgcaatagagcaggagttccggctgcccccgcctccaggctgtcctcctggattacatctacttatgttggacacttggcagaaggaccgtgcccggcggcctcattttgaccagctggtggctgcatttgacaagatgatccgcaagccagataccctgcaggctggcggggacccaggggaaaggccttcccaggcccttctgacccctgtggccctggactttccttgtctggactcaccccaggcctggctttcagccattggactggagtgctaccaggacaacttctccaagtttggcctctgtaccttcagtgatgtggctcagctcagcctagaagacctgcctgccctgggcatcaccctggctggccaccagaagaagctgctgcaccacatccagctccttcagcaacacctgaggcagcagggctcagtggaggtctga

SEQ ID NO: 700 - DNA, 3243 bp, Homo sapiens
atgatctcggctgactgcaacctctgcctcccagaatatgacagatacctagcatctagcaaaataatggcagctgcttaccttgaccccaacttgaatcacacaccaaattcgagtactaagactcacctgggtactggtatggaacgttctcctggtgcaatggagcgagtattaaaggtctttcattattttgaaagcaatagtgagccaaccacctgggccagtattatcaggcatggagatgctactgatgtcaggggcatcattcagaagatagtggacagtcacaaagtaaagcatgtggcctgctatggattccgcctcagtcacctgcggtcagaggaggttcactggcttcacgtggatatgggcgtctccagtgtgagggagaagtatgagcttgctcacccaccagaggagtggaaatatgaattgagaattcgttatttgccaaaaggatttctaaaccagtttactgaagataagccaactttgaatttcttctatcaacaggtgaagagcgattatatgttagagatagctgatcaagtggaccaggaaattgctttgaagttgggttgtctagaaatacggcgatcatactgggagatgcggggcaatgcactagaaaagaagtctaactatgaagtattagaaaaagatgttggtttaaagcgattttttcctaagagtttactggattctgtcaaggccaaaacactaagaaaactgatccaacaaacatttagacaatttgccaaccttaatagagaagaaagtattctgaaattctttgagatcctgtctccagtctacagatttgataaggaatgcttcaagtgtgctcttggttcaagctggattatttcagtggaactggcaatcggcccagaagaaggaatcagttacctaacggacaagggctgcaatcccacacatcttgctgacttcactcaagtgcaaaccattcagtattcaaacagtgaagacaaggacagaaaaggaatgctacaactaaaaatagcaggtgcacccgagcctctgacagtgacggcaccatccctaaccattgcggagaatatggctgacctaatagatgggtactgccggctggtgaatggaacctcgcagtcatttatcatcagacctcagaaagaaggtgaacgggctttgccatcaataccaaagttggccaacagcgaaaagcaaggcatgcggacacacgccgtctctgtgtcagaatgaaattagtggggacgaacagatgattatgctgagattatagatgaagaagatacttacaccatgccctcaaccagggattatgagattcaaagagaaagaatagaacttggacgatgtattggagaaggccaatttggagatgtacatcaaggcatttatatgagtccagagaatccagctttggcggttgcaattaaaacatgtaaaaactgtacttcggacagcgtgagagagaaatttcttcaagaagccttaacaatgcgtcagtttgaccatcctcatattgtgaagctgattggagtcatcacagagaatcctgtctggataatcatggagctgtgcacacttggagagctgaggtcatttttgcaagtaaggaaatacagtttggatctagcatctttgatcctgtatgcctatcagcttagtacagctcttgcatatctagagagcaaaagatttgtacacagggacattgctgctcggaatgttctggtgtcctcaaatgattgtgtaaaattaggagactttggattatcccgatatatggaagatagtacttactacaaagcttccaaaggaaaattgcctattaaatggatggctccagagtcaatcaattttcgacgttttacctcagctagtgacgtatggatgtttggtgtgtgtatgtgggagatactgatgcatggtgtgaagccttttcaaggagtgaagaacaatgatgtaatcggtcgaattgaaaatggggaaagattaccaatgcctccaaattgtcctcctaccctctacagccttatgacgaaatgctgggcctatgaccccagcaggcggcccaggtttactgaacttaaagctcagctcagcacaatcctggaggaagagaaggctcagcaagaagagcgcatgaggatggagtccagaagacaggccacagtgtcctgggactccggagggtctgatgaagcaccgcccaagcccagcagaccgggttatcccagtccgaggtccagcgaaggattttatcccagcccacagcacatggtacaaaccaatcattaccaggtttctggctaccctggttcacatggaatcacagccatggctggcagcatctatccaggtcaggcatctcttttggaccaaacagattcatggaatcatagacctcaggagatagcaatgtggcagcccaatgtggaggactctacagtattggacctgcgagggattgggcaagtgttgccaacccatctgatggaagagcgtctaatccgacagcaacaggaaatggaagaagatcagcgctggctggaaaaagaggaaagatttctgaaacctgatgtgagactctctcgaggcagtattgacagggaggatggaagtcttcagggtccgattggaaaccaacatatatatcagcctgtgggtaaaccagatcctgcagctccaccaaagaaaccgcctcgccctggagctcccggtcatctgggaagccttgccagcctcagcagccctgctgacagctacaacgagggtgtcaagcttcagccccaggaaatcagcccccctcctactgccaacctggaccggtcgaatgataaggtgtacgagaatgtgacgggcctggtgaaagctgtcatcgagatgtccagtaaaatccagccagccccaccagaggagtatgtccctatggtgaaggaagtcggcttggccctgaggacattattggccactgtggatgagaccattcccctcctaccagccagcacccaccgagagattgagatggcacagaagctattgaactctgacctgggtgagctcatcaacaagatgaaactggcccagcagtatgtcatgaccagcctccagcaagagtacaaaaagcaaatgctgactgctgctcacgccctggctgtggatgccaaaaacttactcgatgtcattgaccaagcaagactgaaaatgcttgggcagacgagaccacactga

SEQ ID NO: 701 - DNA, 3234 bp, Homo sapiens
atgatctcggctgactgcaacctctgcctcccagaatatgacagatacctagcatctagcaaaataatggcagctgcttaccttgaccccaacttgaatcacacaccaaattcgagtactaagactcacctgggtactggtatggaacgttctcctggtgcaatggagcgagtattaaaggtctttcattattttgaaagcaatagtgagccaaccacctgggccagtattatcaggcatggagatgctactgatgtcaggggcatcattcagaagatagtggacagtcacaaagtaaagcatgtggcctgctatggattccgcctcagtcacctgcggtcagaggaggttcactggcttcacgtggatatgggcgtctccagtgtgagggagaagtatgagcttgctcacccaccagaggagtggaaatatgaattgagaattcgttatttgccaaaaggatttctaaaccagtttactgaagataagccaactttgaatttcttctatcaacaggtgaagagcgattatatgttagagatagctgatcaagtggaccaggaaattgctttgaagttgggttgtctagaaatacggcgatcatactgggagatgcggggcaatgcactagaaaagaagtctaactatgaagtattagaaaaagatgttggtttaaagcgattttttcctaagagtttactggattctgtcaaggccaaaacactaagaaaactgatccaacaaacatttagacaatttgccaaccttaatagagaagaaagtattctgaaattctttgagatcctgtctccagtctacagatttgataaggaatgcttcaagtgtgctcttggttcaagctggattatttcagtggaactggcaatcggcccagaagaaggaatcagttacctaacggacaagggctgcaatcccacacatcttgctgacttcactcaagtgcaaaccattcagtattcaaacagtgaagacaaggacagaaaaggaatgctacaactaaaaatagcaggtgcacccgagcctctgacagtgacggcaccatccctaaccattgcggagaatatggctgacctaatagatgggtactgccggctggtgaatggaacctcgcagtcatttatcatcagacctcagaaagaaggtgaacgggctttgccatcaataccaaagttggccaacagcgaaaagcaaggcatgcggacacacgccgtctctgtgtcagaaacagatgattatgctgagattatagatgaagaagatacttacaccatgccctcaaccagggattatgagattcaaagagaaagaatagaacttggacgatgtattggagaaggccaatttggagatgtacatcaaggcatttatatgagtccagagaatccagctttggcggttgcaattaaaacatgtaaaaactgtacttcggacagcgtgagagagaaatttcttcaagaagccttaacaatgcgtcagtttgaccatcctcatattgtgaagctgattggagtcatcacagagaatcctgtctggataatcatggagctgtgcacacttggagagctgaggtcatttttgcaagtaaggaaatacagtttggatctagcatctttgatcctgtatgcctatcagcttagtacagctcttgcatatctagagagcaaaagatttgtacacagggacattgctgctcggaatgttctggtgtcctcaaatgattgtgtaaaattaggagactttggattatcccgatatatggaagatagtacttactacaaagcttccaaaggaaaattgcctattaaatggatggctccagagtcaatcaattttcgacgttttacctcagctagtgacgtatggatgtttggtgtgtgtatgtgggagatactgatgcatggtgtgaagccttttcaaggagtgaagaacaatgatgtaatcggtcgaattgaaaatggggaaagattaccaatgcctccaaattgtcctcctaccctctacagccttatgacgaaatgctgggcctatgaccccagcaggcggcccaggtttactgaacttaaagctcagctcagcacaatcctggaggaagagaaggctcagcaagaagagcgcatgaggatggagtccagaagacaggccacagtgtcctgggactccggagggtctgatgaagcaccgcccaagcccagcagaccgggttatcccagtccgaggtccagcgaaggattttatcccagcccacagcacatggtacaaaccaatcattaccaggtttctggctaccctggttcacatggaatcacagccatggctggcagcatctatccaggtcaggcatctcttttggaccaaacagattcatggaatcatagacctcaggagatagcaatgtggcagcccaatgtggaggactctacagtattggacctgcgagggattgggcaagtgttgccaacccatctgatggaagagcgtctaatccgacagcaacaggaaatggaagaagatcagcgctggctggaaaaagaggaaagatttctgaaacctgatgtgagactctctcgaggcagtattgacagggaggatggaagtcttcagggtccgattggaaaccaacatatatatcagcctgtgggtaaaccagatcctgcagctccaccaaagaaaccgcctcgccctggagctcccggtcatctgggaagccttgccagcctcagcagccctgctgacagctacaacgagggtgtcaagccatggaggcttcagccccaggaaatcagcccccctcctactgccaacctggaccggtcgaatgataaggtgtacgagaatgtgacgggcctggtgaaagctgtcatcgagatgtccagtaaaatccagccagccccaccagaggagtatgtccctatggtgaaggaagtcggcttggccctgaggacattattggccactgtggatgagaccattcccctcctaccagccagcacccaccgagagattgagatggcacagaagctattgaactctgacctgggtgagctcatcaacaagatgaaactggcccagcagtatgtcatgaccagcctccagcaagagtacaaaaagcaaatgctgactgctgctcacgccctggctgtggatgccaaaaacttactcgatgtcattgaccaagcaagactgaaaatgcttgggcagacgagaccacactga

SEQ ID NO: 702 - DNA, 2295 bp, Homo sapiens
atgggcttctcttccgagctgtgcagcccccagggccacggggtcctgcagcaaatgcaggaggccgagcttcgtctactggagggcatgagaaagtggatggcccagcgggtcaagagtgacagggagtatgcaggactgcttcaccacatgtccctgcaggacagtgggggccagagccgggccatcagccctgacagccccatcagtcagacccacagccaggacattgagaagctgaagagccagtaccgagctctggcacgggacagtgcccaagccaagcgcaagtaccaggaggccagcaaagacaaggaccgtgacaaggccaaggacaagtatgtgcgcagcctgtggaagctctttgctcaccacaaccgctatgtgctgggcgtgcgggctgcgcagctacaccaccagcaccaccaccagctcctgctgcccggcctgctgcggtcactgcaggacctgcacgaggagatggcttgcatcctgaaggagatcctgcaggaatacctggagattagcagcctggtgcaggatgaggtggtggccattcaccgggagatggctgcagctgctgcccgcatccagcctgaggctgagtaccaaggcttcctgcgacagtatgggtccgcacctgacgtcccaccctgtgtcacgttcgatgagtcactgcttgaggagggtgaaccgctggagcctggggagctccagctgaacgagctgactgtggagagcgtgcagcacacgctgacctcagtgacagatgagctggctgtggccaccgagatggtgttcaggcggcaggagatggttacgcagctgcaacaggagctccggaatgaagaggagaacacccacccccgggagcgggtgcagctgctgggcaagaggcaagtgctgcaagaagcactgcaggggctgcaggtagcgctgtgcagccaggccaagctgcaggcccagcaggagttgctgcagaccaagctggagcacctgggccccggcgagcccccgcctgtgctgctcctgcaggatgaccgccactccacgtcgtcctcggagcaggagcgagaggggggaaggacacccacgctggagatccttaagagccacatctcaggaatcttccgccccaagttctcgctccctccaccgctgcagctcattccggaggtgcagaagcccctgcatgagcagctgtggtaccacggggccatcccgagggcagaggtggctgagctgctggtgcactctggggacttcctggtgcgggagagccagggcaagcaggagtacgtgctgtcggtgctgtgggatggtctgccccggcacttcatcatccagtccttggataacctgtaccgactggaaggggaaggctttcctagcattcctttgctcatcgaccacctactgagcacccagcagcccctcaccaagaagagtggtgttgtcctgcacagggctgtgcccaaggacaagtgggtgctgaaccatgaggacctggtgttgggtgagcagattggacgggggaactttggcgaagtgttcagcggacgcctgcgagccgacaacaccctggtggcggtgaagtcttgtcgagagacgctcccacctgacctcaaggccaagtttctacaggaagcgaggatcctgaagcagtacagccaccccaacatcgtgcgtctcattggtgtctgcacccagaagcagcccatctacatcgtcatggagcttgtgcaggggggcgacttcctgaccttcctccgcacggagggggcccgcctgcgggtgaagactctgctgcagatggtgggggatgcagctgctggcatggagtacctggagagcaagtgctgcatccaccgggacctggctgctcggaactgcctggtgacagagaagaatgtcctgaagatcagtgactttgggatgtcccgagaggaagccgatggggtctatgcagcctcagggggcctcagacaagtccccgtgaagtggaccgcacctgaggcccttaactacggccgctactcctccgaaagcgacgtgtggagctttggcatcttgctctgggagaccttcagcctgggggcctccccctatcccaacctcagcaatcagcagacacgggagtttgtggagaaggggggccgtctgccctgcccagagctgtgtcctgatgccgtgttcaggctcatggagcagtgctgggcctatgagcctgggcagcggcccagcttcagcaccatctaccaggagctgcagagcatccgaaagcggcatcggtga

SEQ ID NO: 703 - DNA, 2469 bp, Homo sapiens
atgggcttctcttccgagctgtgcagcccccagggccacggggtcctgcagcaaatgcaggaggccgagcttcgtctactggagggcatgagaaagtggatggcccagcgggtcaagagtgacagggagtatgcaggactgcttcaccacatgtccctgcaggacagtgggggccagagccgggccatcagccctgacagccccatcagtcagtcctgggctgagatcaccagccaaactgagggcctgagccgcttgctgcggcagcacgcagaggatctgaactcagggcccctgagcaagctgagcctgctcatccgggaacggcagcagcttcgcaagacctacagcgagcagtggcagcagctgcagcaggagctcaccaagacccacagccaggacattgagaagctgaagagccagtaccgagctctggcacgggacagtgcccaagccaagcgcaagtaccaggaggccagcaaagacaaggaccgtgacaaggccaaggacaagtatgtgcgcagcctgtggaagctctttgctcaccacaaccgctatgtgctgggcgtgcgggctgcgcagctacaccaccagcaccaccaccagctcctgctgcccggcctgctgcggtcactgcaggacctgcacgaggagatggcttgcatcctgaaggagatcctgcaggaatacctggagattagcagcctggtgcaggatgaggtggtggccattcaccgggagatggctgcagctgctgcccgcatccagcctgaggctgagtaccaaggcttcctgcgacagtatgggtccgcacctgacgtcccaccctgtgtcacgttcgatgagtcactgcttgaggagggtgaaccgctggagcctggggagctccagctgaacgagctgactgtggagagcgtgcagcacacgctgacctcagtgacagatgagctggctgtggccaccgagatggtgttcaggcggcaggagatggttacgcagctgcaacaggagctccggaatgaagaggagaacacccacccccgggagcgggtgcagctgctgggcaagaggcaagtgctgcaagaagcactgcaggggctgcaggtagcgctgtgcagccaggccaagctgcaggcccagcaggagttgctgcagaccaagctggagcacctgggccccggcgagccccggcctgtgctgctcctgcaggatgaccgccactccacgtcgtcctcggagcaggagcgagaggggggaaggacacccacgctggagatccttaagagccacatctcaggaatcttccgccccaagttctcgctccctccaccgctgcagctcattccggaggtgcagaagcccctgcatgagcagctgtggtaccacggggccatcccgagggcagaggtggctgagctgctggtgcactctggggacttcctggtgcgggagagccagggcaagcaggagtacgtgctgtcggtgctgtgggatggtctgccccggcacttcatcatccagtccttggataacctgtaccgactggaaggggaaggctttcctagcattcctttgctcatcgaccacctactgagcacccagcagcccctcaccaagaagagtggtgttgtcctgcacagggctgtgcccaaggacaagtgggtgctgaaccatgaggacctggtgttgggtgagcagattggacgggggaactttggcgaagtgttcagcggacgcctgcgagccgacaacaccctggtggcggtgaagtcttgtcgagagacgctcccacctgacctcaaggccaagtttctacaggaagcgaggatcctgaagcagtacagccaccccaacatcgtgcgtctcattggtgtctgcacccagaagcagcccatctacatcgtcatggagcttgtgcaggggggcgacttcctgaccttcctccgcacggagggggcccgcctgcgggtgaagactctgctgcagatggtgggggatgcagctgctggcatggagtacctggagagcaagtgctgcatccaccgggacctggctgctcggaactgcctggtgacagagaagaatgtcctgaagatcagtgactttgggatgtcccgagaggaagccgatggggtctatgcagcctcagggggcctcagacaagtccccgtgaagtggaccgcacctgaggcccttaactacggccgctactcctccgaaagcgacgtgtggagctttggcatcttgctctgggagaccttcagcctgggggcctccccctatcccaacctcagcaatcagcagacacgggagtttgtggagaaggggggccgtctgccctgcccagagctgtgtcctgatgccgtgttcaggctcatggagcagtgctgggcctatgagcctgggcagcggcccagcttcagcaccatctaccaggagctgcagagcatccgaaagcggcatcggtga

SEQ ID NO: 704 - DNA, 2504 bp, Homo sapiens
atgggcttctcttccgagctgtgcagcccccagggccacggggtcctgcagcaaatgcaggaggccgagcttcgtctactggagggcatgagaaagtggatggcccagcgggtcaagagtgacagggagtatgcaggactgcttcaccacatgtccctgcaggacagtgggggccagagccgggccatcagccctgacagccccatcagtcagtcctgggctgagatcaccagccaaactgagggcctgagccgcttgctgcggcagcacgcagaggatctgaactcagggcccctgagcaagctgagcctgctcatccgggaacggcagcagcttcgcaagacctacagcgagcagtggcagcagctgcagcaggagctcaccaagacccacagccaggacattgagaagctgaagagccagtaccgagctctggcacgggacagtgcccaagccaagcgcaagtaccaggaggccagcaaagacaaggaccgtgacaaggccaaggacaagtatgtgcgcagcctgtggaagctctttgctcaccacaaccgctatgtgctgggcgtgcgggctgcgcagctacaccaccagcaccaccaccagctcctgctgcccggcctgctgcggtcactgcaggacctgcacgaggagatggcttgcatcctgaaggagatcctgcaggaatacctggagattagcagcctggtgcaggatgaggtggtggccattcaccgggagatggctgcagctgctgcccgcatccagcctgaggctgagtaccaaggcttcctgcgacagtatgggtccgcacctgacgtcccaccctgtgtcacgttcgatgagtcactgcttgaggagggtgaaccgctggagcctggggagctccagctgaacgagctgactgtggagagcgtgcagcacacgctgacctcagtgacagatgagctggctgtggccaccgagatggtgttcaggcggcaggagatggttacgcagctgcaacaggagctccggaatgaagaggagaacacccacccccgggagcgggtgcagctgctgggcaagaggcaagtgctgcaagaagcactgcaggggctgcaggtagcgctgtgcagccaggccaagctgcaggcccagcaggagttgctgcagaccaagctggagcacctgggccccggcgagcccccgcctgtgctgctcctgcaggatgaccgccactccacgtcgtcctcgcctggccacccgctgacgtctgtccctggcctcaggagcaggagcgagaggggggaaggacacccacgctggagatccttaagagccacatctcaggaatcttccgccccaagttctcgctccctccaccgctgcagctcattccggaggtgcagaagcccctgcatgagcagctgtggtaccacggggccatcccgagggcagaggtggctgagctgctggtgcactctggggacttcctggtgcgggagagccagggcaagcaggagtacgtgctgtcggtgctgtgggatggtctgccccggcacttcatcatccagtccttggataacctgtaccgactggaaggggaaggctttcctagcattcctttgctcatcgaccacctactgagcacccagcagcccctcaccaagaagagtggtgttgtcctgcacagggctgtgcccaaggacaagtgggtgctgaaccatgaggacctggtgttgggtgagcagattggacgggggaactttggcgaagtgttcagcggacgcctgcgagccgacaacaccctggtggcggtgaagtcttgtcgagagacgctcccacctgacctcaaggccaagtttctacaggaagcgaggatcctgaagcagtacagccaccccaacatcgtgcgtctcattggtgtctgcacccagaagcagcccatctacatcgtcatggagcttgtgcaggggggcgacttcctgaccttcctccgcacggagggggcccgcctgcgggtgaagactctgctgcagatggtgggggatgcagctgctggcatggagtacctggagagcaagtgctgcatccaccgggacctggctgctcggaactgcctggtgacagagaagaatgtcctgaagatcagtgactttgggatgtcccgagaggaagccgatggggtctatgcagcctcagggggcctcagacaagtccccgtgaagtggaccgcacctgaggcccttaactacggccgctactcctccgaaagcgacgtgtggagctttggcatcttgctctgggagaccttcagcctgggggcctccccctatcccaacctcagcaatcagcagacacgggagtttgtggagaaggggggccgtctgccctgcccagagctgtgtcctgatgccgtgttcaggctcatggagcagtgctgggcctatgagcctgggcagcggcccagcttcagcaccatctaccaggagctgcagagcatccgaaagcggcatcggtga

SEQ ID NO: 705 - DNA, 2463 bp, Homo sapiens
atgggcttctcttccgagctgtgcagcccccagggccacggggtcctgcagcaaatgcaggaggccgagcttcgtctactggagggcatgagaaagtggatggcccagcgggtcaagagtgacagggagtatgcaggactgcttcaccacatgtccctgcaggacagtgggggccagagccgggccatcagccctgacagccccatcagtcagtcctgggctgagatcaccagccaaactgagggcctgagccgcttgctgcggcagcacgcagaggatctgaactcagggcccctgagcaagctgagcctgctcatccgggaacggcagcagcttcgcaagacctacagcgagcagtggcagcagctgcagcaggagctcaccaagacccacagccaggacattgagaagctgaagagccagtaccgagctctggcacgggacagtgcccaagccaagcgcaagtaccaggaggccagcaaagacaaggaccgtgacaaggccaaggacaagtatgtgcgcagcctgtggaagctctttgctcaccacaaccgctatgtgctgggcgtgcgggctgcgcagctacaccaccagcaccaccaccagctcctgctgcccggcctgctgcggtcactgcaggacctgcacgaggagatggcttgcatcctgaaggagatcctgcaggaatacctggagattagcagcctggtgcaggatgaggtggtggccattcaccgggagatggctgcagctgctgcccgcatccagcctgaggctgagtaccaaggcttcctgcgacagtatgggtccgcacctgacgtcccaccctgtgtcacgttcgatgagtcactgcttgaggagggtgaaccgctggagcctggggagctccagctgaacgagctgactgtggagagcgtgcagcacacgctgacctcagtgacagatgagctggctgtggccaccgaggtggtgttcaggcggcaggagatggttacgcagctgcaacaggagctccggaatgaagaggagaacacccacccccgggagcgggtgcagctgctgggcaagaggcaagtgctgcaagaagcactgcaggggctgcaggtagcgctgtgcagccaggccaagctgcaggcccagcaggagttgctgcagaccaagctggagcacctgggccccggcgagcccccgcctgtgctgctcctgcaggatgaccgccactccacgtcgtcctcggagcaggagcgagaggggggaaggacacccacgctggagatcctccacatctcaggaatcttccgccccaagttctcgctccctccaccgctgcagctcattccggaggtgcagaagcccctgcatgagcagctgtggtaccacggggccatcccgagggcagaggtggctgagctgctggtgcactctggggacttcctggtgcgggagagccagggcaagcaggagtacgtgctgtcggtgctgtgggatggtctgccccggcacttcatcatccagtccttggataacctgtaccgactggaaggggaaggctttcctagcattcctttgctcatcgaccacctactgagcacccagcagcccctcaccaagaagagtggtgttgtcctgcacagggctgtgcccaaggacaagtgggtgctgaaccatgaggacctggtgttgggtgagcagattggacgggggaactttggcgaagtgttcagcggacgcctgcgagccgacaacaccctggtggcggtgaagtcttgtcgagagacgctcccacctgacctcaaggccaagtttctacaggaagcgaggatcctgaagcagtacagccaccccaacatcgtgcgtctcattggtgtctgcacccagaagcagcccatctacatcgtcatggagcttgtgcaggggggcgacttcctgaccttcctccgcacggagggggcccgcctgcgggtgaagactctgctgcagatggtgggggatgcagctgctggcatggagtacctggagagcaagtgctgcatccaccgggacctggctgctcggaactgcctggtgacagagaagaatgtcctgaagatcagtgactttgggatgtcccgagaggaagccgatggggtctatgcagcctcagggggcctcagacaagtccccgtgaagtggaccgcacctgaggcccttaactacggccgctactcctccgaaagcgacgtgtggagctttggcatcttgctctgggagaccttcagcctgggggcctccccctatcccaacctcagcaatcagcagacacgggagtttgtggagaaggggggccgtctgccctgcccagagctgtgtcctgatgccgtgttcaggctcatggagcagtgctgggcctatgagcctgggcagcggcccagcttcagcaccatctaccaggagctgcagagcatccgaaagcggcatcggtga

SEQ ID NO: 706 - DNA, 2118 bp, Homo sapiens
atggtcagctggggtcgtttcatctgcctggtcgtggtcaccatggcaaccttgtccctggcccggccctccttcagtttagttgaggataccacattagagccagaaggagcaccatactggaccaacacagaaaagatggaaaagcggctccatgctgtgcctgcggccaacactgtcaagtttcgctgcccagccggggggaacccaacgccaaccatgcggtggctgaaaaacgggaaggagtttaagcaggagcatcgcattggaggctacaaggtacgaaaccagcactggagcctcattatggaaagtgtggtcccatctgacaagggaaattatacctgtgtagtggagaatgaatacgggtccatcaatcacacgtaccacctggatgttgtggagcgatcgcctcaccggcccatcctccaagccggactgccggcaaatgcctccacagtggtcggaggagacgtagagtttgtctgcaaggtttacagtgatgcccagccccacatccagtggatcaagcacgtggaaaagaacggcagtaaatacgggcccgacgggctgccctacctcaaggttctcaagcactcggggataaatagttccaatgcagaagtgctggctctgttcaatgtgaccgaggcggatgctggggaatatatatgtaaggtctccaattatatagggcaggccaaccagtctgcctggctcactgtcctgccaaaacagcaagcgcctggaagagaaaaggagattacagcttccccagactacctggagatagccatttactgcataggggtcttcttaatcgcctgtatggtggtaacagtcatcctgtgccgaatgaagaacacgaccaagaagccagacttcagcagccagccggctgtgcacaagctgaccaaacgtatccccctgcggagacaggtttcggctgagtccagctcctccatgaactccaacaccccgctggtgaggataacaacacgcctctcttcaacggcagacacccccatgctggcaggggtctccgagtatgaacttccagaggacccaaaatgggagtttccaagagataagctgacactgggcaagcccctgggagaaggttgctttgggcaagtggtcatggcggaagcagtgggaattgacaaagacaagcccaaggaggcggtcaccgtggccgtgaagatgttgaaagatgatgccacagagaaagacctttctgatctggtgtcagagatggagatgatgaagatgattgggaaacacaagaatatcataaatcttcttggagcctgcacacaggatgggcctctctatgtcatagttgagtatgcctctaaaggcaacctccgagaatacctccgagcccggaggccacccgggatggagtactcctatgacattaaccgtgttcctgaggagcagatgaccttcaaggacttggtgtcatgcacctaccagctggccagacggatggagtacttggcttcccaaaaatgtattcatcgagatttagcagccagaaatgttttggtaacagaaaacaatgtgatgaaaatagcagactttggactcgccagagatatcaacaatatagactattacaaaaagaccaccaatgggcggcttccagtcaagtggatggctccagaagccctgtttgatagagtatacactcatcagagtgatgtctggtccttcggggtgttaatgtgggagatcttcactttagggggctcgccctacccagggattcccgtggaggaactttttaagctgctgaaggaaggacacagaatggataagccagccaactgcaccaacgaactgtacatgatgatgagggactgttggcatgcagtgccctcccagagaccaacgttcaagcagttggtagaagacttggatcgaattctcactctcacaaccaatgaggaatacttggacctcagccaacctctcgaacagtattcacctagttaccctgacacaagaagttcttgttcttcaggagatgattctgttttttctccagaccccatgccttacgaaccatgccttcctcagtatccacacataaacggcagtgttaaaacatga

SEQ ID NO: 707 - DNA, 1971 bp, Homo sapiens
atggtcagctggggtcgtttcatctgcctggtcgtggtcaccatggcaaccttgtccctggcccggccctccttcagtttagttgaggataccacattagagccagaaggagcaccatactggaccaacacagaaaagatggaaaagcggctccatgctgtgcctgcggccaacactgtcaagtttcgctgcccagccggggggaacccaatgccaaccatgcggtggctgaaaaacgggaaggagtttaagcaggagcatcgcattggaggctacaaggtacgaaaccagcactggagcctcattatggaaagtgtggtcccatctgacaagggaaattatacctgtgtagtggagaatgaatacgggtccatcaatcacacgtaccacctggatgttgtggagcgatcgcctcaccggcccatcctccaagccggactgccggcaaatgcctccacagtggtcggaggagacgtagagtttgtctgcaaggtttacagtgatgcccagccccacatccagtggatcaagcacgtggaaaagaacggcagtaaatacgggcccgacgggctgccctacctcaaggttctcaaagcgcctggaagagaaaaggagattacagcttccccagactacctggagatagccatttactgcataggggtcttcttaatcgcctgtatggtggtaacagtcatcctgtgccgaatgaagaacacgaccaagaagccagacttcagcagccagccggctgtgcacaagctgaccaaacgtatccccctgcggagacaggtttcggctgagtccagctcctccatgaactccaacaccccgctggtgaggataacaacacgcctctcttcaacggcagacacccccatgctggcaggggtctccgagtatgaacttccagaggacccaaaatgggagtttccaagagataagctgacactgggcaagcccctgggagaaggttgctttgggcaagtggtcatggcggaagcagtgggaattgacaaagacaagcccaaggaggcggtcaccgtggccgtgaagatgttgaaagatgatgccacagagaaagacctttctgatctggtgtcagagatggagatgatgaagatgattgggaaacacaagaatatcataaatcttcttggagcctgcacacaggatgggcctctctatgtcatagttgagtatgcctctaaaggcaacctccgagaatacctccgagcccggaggccacccgggatggagtactcctatgacattaaccgtgttcctgaggagcagatgaccttcaaggacttggtgtcatgcacctaccagctggccagacggatggagtacttggcttcccaaaaatgtattcatcgagatttagcagccagaaatgttttggtaacagaaaacaatgtgatgaaaatagcagactttggactcgccagagatatcaacaatatagactattacaaaaagaccaccaatgggcggcttccagtcaagtggatggctccagaagccctgtttgatagagtatacactcatcagagtgatgtctggtccttcggggtgttaatgtgggagatcttcactttagggggctcgccctacccagggattcccgtggaggaactttttaagctgctgaaggaaggacacagaatggataagccagccaactgcaccaacgaactgtacatgatgatgagggactgttggcatgcagtgccctcccagagaccaacgttcaagcagttggtagaagacttggatcgaattctcactctcacaaccaatgaggaatacttggacctcagccaacctctcgaacagtattcacctagttaccctgacacaagaagttcttgttcttcaggagatgattctgttttttctccagaccccatgccttacgaaccatgccttcctcagtatccacacataaacggcagtgttaaaacatga

SEQ ID NO: 708 - DNA, 2409 bp, Homo sapiens
atgcggctgctgctggccctgttggggatcctgctgagtgtgcctgggcctccagtcttgtccctggaggcctctgaggaagtggagcttgagccctgcctggctcccagcctggagcagcaagagcaggagctgacagtagcccttgggcagcctgtgcgtctgtgctgtgggcgggctgagcgtggtggccactggtacaaggagggcagtcgcctggcacctgctggccgtgtacggggctggaggggccgcctagagattgccagcttcctacctgaggatgctggccgctacctctgcctggcacgaggctccatgatcgtcctgcagaatctcaccttgattacaggtgactccttgacctccagcaacgatgatgaggaccccaagtcccatagggacctctcgaataggcacagttacccccagcaagcaccctactggacacacccccagcgcatggagaagaaactgcatgcagtacctgcggggaacaccgtcaagttccgctgtccagctgcaggcaaccccacgcccaccatccgctggcttaaggatggacaggcctttcatggggagaaccgcattggaggcattcggctgcgccatcagcactggagtctcgtgatggagagcgtggtgccctcggaccgcggcacatacacctgcctggtagagaacgctgtgggcagcatccgctataactacctgctagatgtgctggagcggtccccgcaccggcccatcctgcaggccgggctcccggccaacaccacagccgtggtgggcagcgacgtggagctgctgtgcaaggtgtacagcgatgcccagccccacatccagtggctgaagcacatcgtcatcaacggcagcagcttcggagccgacggtttcccctatgtgcaagtcctaaagactgcagacatcaatagctcagaggtggaggtcctgtacctgcggaacgtgtcagccgaggacgcaggcgagtacacctgcctcgcaggcaattccatcggcctctcctaccagtctgcctggctcacggtgctgccagaggaggaccccacatggaccgcagcagcgcccgaggccaggtatacggacatcatcctgtacgcgtcgggctccctggccttggctgtgctcctgctgctggccgggctgtatcgagggcaggcgctccacggccggcacccccgcccgcccgccactgtgcagaagctctcccgcttccctctggcccgacagttctccctggagtcaggctcttccggcaagtcaagctcatccctggtacgaggcgtgcgtctctcctccagcggccccgccttgctcgccggcctcgtgagtctagatctacctctcgacccactatgggagttcccccgggacaggctggtgcttgggaagcccctaggcgagggctgctttggccaggtagtacgtgcagaggcctttggcatggaccctgcccggcctgaccaagccagcactgtggccgtcaagatgctcaaagacaacgcctctgacaaggacctggccgacctggtctcggagatggaggtgatgaagctgatcggccgacacaagaacatcatcaacctgcttggtgtctgcacccaggaagggcccctgtacgtgatcgtggagtgcgccgccaagggaaacctgcgggagttcctgcgggcccggcgccccccaggccccgacctcagccccgacggtcctcggagcagtgaggggccgctctccttcccagtcctggtctcctgcgcctaccaggtggcccgaggcatgcagtatctggagtcccggaagtgtatccaccgggacctggctgcccgcaatgtgctggtgactgaggacaatgtgatgaagattgctgactttgggctggcccgcggcgtccaccacattgactactataagaaaaccagcaacggccgcctgcctgtgaagtggatggcgcccgaggccttgtttgaccgggtgtacacacaccagagtgacgtgtggtcttttgggatcctgctatgggagatcttcaccctcgggggctccccgtatcctggcatcccggtggaggagctgttctcgctgctgcgggagggacatcggatggaccgacccccacactgccccccagagctgtacgggctgatgcgtgagtgctggcacgcagcgccctcccagaggcctaccttcaagcagctggtggaggcgctggacaaggtcctgctggccgtctctgaggagtacctcgacctccgcctgaccttcggaccctattccccctctggtggggacgccagcagcacctgctcctccagcgattctgtcttcagccacgaccccctgccattgggatccagctccttccccttcgggtctggggtgcagacatga

SEQ ID NO: 709 - DNA, 2409 bp, Homo sapiens
atgcggctgctgctggccctgttgggggtcctgctgagtgtgcctgggcctccagtcttgtccctggaggcctctgaggaagtggagcttgagccctgcctggctcccagcctggagcagcaagagcaggagctgacagtagcccttgggcagcctgtgcgtctgtgctgtgggcgggctgagcgtggtggccactggtacaaggagggcagtcgcctggcacctgctggccgtgtacggggctggaggggccgcctagagattgccagcttcctacctgaggatgctggccgctacctctgcctggcacgaggctccatgatcgtcctgcagaatctcaccttgattacaggtgactccttgacctccagcaacgatgatgaggaccccaagtcccatagggacccctcgaataggcacagttacccccagcaagcaccctactggacacacccccagcgcatggagaagaaactgcatgcagtacctgcggggaacaccgtcaagttccgctgtccagctgcaggcaaccccacgcccaccatccgctggcttaaggatggacaggcctttcatggggagaaccgcattggaggcattcggctgcgccatcagcactggagtctcgtgatggagagcgtggtgccctcggaccgcggcacatacacctgcctggtagagaacgctgtgggcagcatccgctataactacctgctagatgtgctggagcggtccccgcaccggcccatcctgcaggccgggctcccggccaacaccacagccgtggtgggcagcgacgtggagctgctgtgcaaggtgtacagcgatgcccagccccacatccagtggctgaagcacatcgtcatcaacggcagcagcttcggagccgacggtttcccctatgtgcaagtcctaaagactgcagacatcaatagctcagaggtggaggtcctgtacctgcggaacgtgtcagccgaggacgcaggcgagtacacctgcctcgcaggcaattccatcggcctctcctaccagtctgcctggctcacggtgctgccagaggaggaccccacatggaccgcagcagcgcccgaggccaggtatacggacatcatcctgtacgcgtcgggctccctggccttggctgtgctcctgctgctggccgggctgtatcgagggcaggcgctccacggccggcacccccgcccgcccgccactgtgcagaagctctcccgcttccctctggcccgacagttctccctggagtcaggctcttccggcaagtcaagctcatccctggtacgaggcgtgcgtctctcctccagcggccccgccttgctcgccggcctcgtgagtctagatctacctctcgacccactatgggagttcccccgggacaggctggtgcttgggaagcccctaggcgagggctgctttggccaggtagtacgtgcagaggcctttggcatggaccctgcccggcctgaccaagccagcactgtggccgtcaagatgctcaaagacaacgcctctgacaaggacctggccgacctggtctcggagatggaggtgatgaagctgatcggccgacacaagaacatcatcaacctgcttggtgtctgcacccaggaagggcccctgtacgtgatcgtggagtgcgccgccaagggaaacctgcgggagttcctgcgggcccggcgccccccaggccccgacctcagccccgacggtcctcggagcagtgaggggccgctctccttcccagtcctggtctcctgcgcctaccaggtggcccgaggcatgcagtatctggagtcccggaagtgtatccaccgggacctggctgcccgcaatgtgctggtgactgaggacaatgtgatgaagattgctgactttgggctggcccgcggcgtccaccacattgactactataagaaaaccagcaacggccgcctgcctgtgaagtggatggcgcccgaggccttgtttgaccgggtgtacacacaccagagtgacgtgtggtcttttgggatcctgctatgggagatcttcaccctcgggggctccccgtatcctggcatcccggtggaggagctgttctcgctgctgcgggagggacatcggatggaccgacccccacactgccccccagagctgtacgggctgatgcgtgagtgctggcacgcagcgccctcccagaggcctaccttcaagcagctggtggaggcgctggacaaggtcctgctggccgtctctgaggagtacctcgacctccgcctgaccttcggaccctattccccctctggtggggacgccagcagcacctgctcctccagcgattctgtcttcagccacgaccccctgccattgggatccagctccttccccttcgggtctggggtgcagacatga

SEQ ID NO: 710 - DNA, 2409 bp, Homo sapiens
atgcggctgctgctggccctgttgggggtcctgctgagtgtgcctgggcctccagtcttgtccctggaggcctctgaggaagtggagcttgagccctgcctggctcccagcctggagcagcaagagcaggagctgacagtagcccttgggcagcctgtgcgtctgtgctgtgggcgggctgagcgtggtggccactggtacaaggagggcagtcgcctggcacctgctggccgtgtacggggctggaggggccgcctagagattgccagcttcctacctgaggatgctggccgctacctctgcctggcacgaggctccatgatcgtcctgcagaatctcaccttgattacaggtgactccttgacctccagcaacgatgatgaggaccccaagtcccatagggacctctcgaataggcacagttacccccagcaagcaccctactggacacacccccagcgcatggagaagaaactgcatgcagtacctgcggggaacaccgtcaagttccgctgtccagctgcaggcaaccccacgcccaccatccgctggcttaaggatggacaggcctttcatggggagaaccgcattggaggcattcggctgcgccatcagcactggagtctcgtgatggagagcgtggtgccctcggaccgcggcacatacacctgcctggtagagaacgctgtgggcagcatccgctataactacctgctagatgtgctggagcggtccccgcaccggcccatcctgcaggccgggctcccggccaacaccacagccgtggtgggcagcgacgtggagctgctgtgcaaggtgtacagcgatgcccagccccacatccagtggctgaagcacatcgtcatcaacggcagcagcttcggagccgacggtttcccctatgtgcaagtcctaaagactgcagacatcaatagctcagaggtggaggtcctgtacctgcggaacgtgtcagccgaggacgcaggcgagtacacctgcctcgcaggcaattccatcggcctctcctaccagtctgcctggctcacggtgctgccagaggaggaccccacatggaccgcagcagcgcccgaggccaggtatacggacatcatcctgtacgcgtcgggctccctggccttggctgtgctcctgctgctggccaggctgtatcgagggcaggcgctccacggccggcacccccgcccgcccgccactgtgcagaagctctcccgcttccctctggcccgacagttctccctggagtcaggctcttccggcaagtcaagctcatccctggtacgaggcgtgcgtctctcctccagcggccccgccttgctcgccggcctcgtgagtctagatctacctctcgacccactatgggagttcccccgggacaggctggtgcttgggaagcccctaggcgagggctgctttggccaggtagtacgtgcagaggcctttggcatggaccctgcccggcctgaccaagccagcactgtggccgtcaagatgctcaaagacaacgcctctgacaaggacctggccgacctggtctcggagatggaggtgatgaagctgatcggccgacacaagaacatcatcaacctgcttggtgtctgcacccaggaagggcccctgtacgtgatcgtggagtgcgccgccaagggaaacctgcgggagttcctgcgggcccggcgccccccaggccccgacctcagccccgacggtcctcggagcagtgaggggccgctctccttcccagtcctggtctcctgcgcctaccaggtggcccgaggcatgcagtatctggagtcccggaagtgtatccaccgggacctggctgcccgcaatgtgctggtgactgaggacaatgtgatgaagattgctgactttgggctggcccgcggcgtccaccacattgactactataagaaaaccagcaacggccgcctgcctgtgaagtggatggcgcccgaggccttgtttgaccgggtgtacacacaccagagtgacgtgtggtcttttgggatcctgctatgggagatcttcaccctcgggggctccccgtatcctggcatcccggtggaggagctgttctcgctgctgcgggagggacatcggatggaccgacccccacactgccccccagagctgtacgggctgatgcgtgagtgctggcacgcagcgccctcccagaggcctaccttcaagcagctggtggaggcgctggacaaggtcctgctggccgtctctgaggagtacctcgacctccgcctgaccttcggaccctattccccctctggtggggacgccagcagcacctgctcctccagcgattctgtcttcagccacgaccccctgccattgggatccagctccttccccttcgggtctggggtgcagacatga

SEQ ID NO: 711 - DNA, 2982 bp, Homo sapiens
atgccggcgttggcgcgcgacggcggccagctgccgctgctcgttgttttttctgcaatgatatttgggactattacaaatcaagatctgcctgtgatcaagtgtgttttaatcaatcataagaacaatgattcatcagtggggaagtcatcatcatatcccatggtatcagaatccccggaagacctcgggtgtgcgttgagaccccagagctcagggacagtgtacgaacgtgccgctgtggaagtggatgtatctgcttccatcacactgcaagtgctggtcgatgccccagggaacatttcctgtctctgggtctttaagcacagctccctgaattgccagccacattttgatttacaaaacagaggagttgtttccatggtcattttgaaaatgacagaaacccaagctggagaatacctactttttattcagagtgaagctaccaattacacaatattgtttacagtgagtataagaaataccctgctttacacattaagaagaccttactttagaaaaatggaaaaccaggacgccctggtctgcatatctgagagcgttccagagccgatcgtggaatgggtgctttgcgattcacagggggaaagctgtaaagaagaaagtccagctgttgttaaaaaggaggaaaaagtgcttcatgaattatttgggacggacataaggtgctgtgccagaaatgaactgggcagggaatgcaccaggctgttcacaatagatctaaatcaaactcctcagaccacattgccacaattatttcttaaagtaggggaacccttatggataaggtgcaaagctgttcatgtgaaccatggattcgggctcacctgggaattagaaaacaaagcactcgaggagggcaactactttgagatgagtacctattcaacaaacagaactatgatacggattctgtttgcttttgtatcatcagtggcaagaaacgacaccggatactacacttgttcctcttcaaagcatcccagtcaatcagctttggttaccatcgtagaaaagggatttataaatgctaccaattcaagtgaagattatgaaattgaccaatatgaagagttttgtttttctgtcaggtttaaagcctacccacaaatcagatgtacgtggaccttctctcgaaaatcatttccttgtgagcaaaagggtcttgataacggatacagcatatccaagttttgcaatcataagcaccagccaggagaatatatattccatgcagaaaatgatgatgcccaatttaccaaaatgttcacgctgaatataagaaggaaacctcaagtgctcgcagaagcatcggcaagtcaggcgtcctgtttctcggatggatacccattaccatcttggacctggaagaagtgttcagacaagtctcccaactgcacagaagagatcacagaaggagtctggaatagaaaggctaacagaaaagtgtttggacagtgggtgtcgagcagtactctaaacatgagtgaagccataaaagggttcctggtcaagtgctgtgcatacaattcccttggcacatcttgtgagacgatccttttaaactctccaggccccttccctttcatccaagacaacatctcattctatgcaacaattggtgtttgtctcctcttcattgtcgttttaaccctgctaatttgtcacaagtacaaaaagcaatttaggtatgaaagccagctacagatggtacaggtgaccggctcctcagataatgagtacttctacgttgatttcagagaatatgaatatgatctcaaatgggagtttccaagagaaaatttagagtttgggaaggtactaggatcaggtgcttttggaaaagtgatgaacgcaacagcttatggaattagcaaaacaggagtctcaatccaggttgccgtcaaaatgctgaaagaaaaagcagacagctctgaaagagaggcactcatgtcagaactcaagatgatgacccagctgggaagccacgagaatattgtgaacctgctgggggcgtgcacactgtcaggaccaatttacttgatttttgaatactgttgctatggtgatcttctcaactatctaagaagtaaaagagaaaaatttcacaggacttggacagagattttcaaggaacacaatttcagtttttaccccactttccaatcacatccaaattccagcatgcctggttcaagagaagttcagatacacccggactcggatcaaatctcagggcttcatgggaattcatttcactctgaagatgaaattgaatatgaaaaccaaaaaaggctggaagaagaggaggacttgaatgtgcttacatttgaagatcttctttgctttgcatatcaagttgccaaaggaatggaatttctggaatttaagtcgtgtgttcacagagacctggccgccaggaacgtgcttgtcacccacgggaaagtggtgaagatatgtgactttggattggctcgagatatcatgagtgattccaactatgttgtcaggggcaatgcccgtctgcctgtaaaatggatggcccccgaaagcctgtttgaaggcatctacaccattaagagtgatgtctggtcatatggaatattactgtgggaaatcttctcacttggtgtgaatccttaccctggcattccggttgatgctaacttctacaaactgattcaaaatggatttaaaatggatcagccattttatgctacagaagaaatatacattataatgcaatcctgctgggcttttgactcaaggaaacggccatccttccctaatttgacttcgtttttaggatgtcagctggcagatgcagaagaagcgatgtatcagaatgtggatggccgtgtttcggaatgtcctcacacctaccaaaacaggcgacctttcagcagagagatggatttggggctactctctccgcaggctcaggtcgaagattcgtag

SEQ ID NO: 712 - DNA, 1518 bp, Homo sapiens
atgagcaacatctgtcagaggctctgggagtacctagaaccctatctcccctgtttgtccacggaggcagacaagtcaaccgtgattgaaaatccaggggccctttgctctccccagtcacagaggcatggccactactttgtggctttgtttgattaccaggctcggactgctgaggacttgagcttccgagcaggtgacaaacttcaagttctggacactttgcatgagggctggtggtttgccagacacttggagaaaagacgagatggctccagtcagcaactacaaggctatattccttctaactacgtggctgaggacagaagcctacaggcagagccgtggttctttggagcaatcagaagatcagatgcagagaaacaactattatattcagaaaacaagaccggttcctttctaatcagagaaagtgaaagccaaaaaggagaattctctctttcagttttagatggagcagttgtaaaacactacagaattaaaagactggatgaagggggattttttctcacgcgaagaagaatcttttcaacactgaacgaatttgtgagccactacaccaagacaagtgacggcctgtgtgtcaagctggggaaaccatgcttaaagatccaggtcccagctccatttgatttgtcgtataaaaccgtggaccaatgggagatagaccgcaactccatacagcttctgaagcgattgggatctggtcagtttggcgaagtatgggaaggtctgtggaacaataccactccagtagcagtgaaaacattaaaaccaggttcaatggatccaaatgacttcctgagggaggcacagataatgaagaacctaagacatccaaagcttatccagctttatgctgtttgcactttagaagatccaatttatattattacagagttgatgagacatggaagtctgcaagaatatctccaaaatgacactggatcaaaaatccatctgactcaacaggtagacatggcggcacaggttgcctctggaatggcctatctggagtctcggaactacattcacagagatctggctgccagaaatgtcctcgttggtgaacataatatctacaaagtagcagattttggacttgccagagtttttaaggtagataatgaagacatctatgaatctagacacgaaataaagctgccggtgaagtggactgcgcccgaagccattcgtagtaataaattcagcattaagtccgatgtatggtcatttggaatccttctttatgaaatcattacttatggcaaaatgccttacagtggtatgacaggtgcccaggtaatccagatgttggctcaaaactatagacttccgcaaccatccaactgtccacagcaattttacaacatcatgttggagtgctggaatgcagagcctaaggaacgacctacatttgagacactgcgttggaaacttgaagactattttgaaacagactcttcatattcagatgcaaataacttcataagatga

SEQ ID NO: 713 - DNA, 1614 bp, Homo sapiens
atgggctgtgtgcaatgtaaggataaagaagcaacaaaactgacggaggagagggacggcagcctgaaccagagctctgggtaccgctatggcacagaccccacccctcagcactaccccagcttcggtgtgacctccatccccaactacaacaacttccacgcagccgggggccaaggactcaccgtctttggaggtgtgaactcttcgtctcatacggggaccttgcgtacgagaggaggaacaggagtgacactctttgtggccctttatgactatgaagcacggacagaagatgacctgagttttcacaaaggagaaaaatttcaaatattgaacagctcggaaggagattggtgggaagcccgctccttgacaactggagagacaggttacattcccagcaattatgtggctccagttgactctatccaggcagaagagtggtactttggaaaacttggccgaaaagatgctgagcgacagctattgtcctttggaaacccaagaggtacctttcttatccgcgagagtgaaaccaccaaaggtgcctattcactttctatccgtgattgggatgatatgaaaggagaccatgtcaaacattataaaattcgcaaacttgacaatggtggatactacattaccacccgggcccagtttgaaacacttcagcagcttgtacaacattactcagagagagctgcaggtctctgctgccgcctagtagttccctgtcacaaagggatgccaaggcttaccgatctgtctgtcaaaaccaaagatgtctgggaaatccctcgagaatccctgcagttgatcaagagactgggaaatgggcagtttggggaagtatggatgggtacctggaatggaaacacaaaagtagccataaagactcttaaaccaggcacaatgtcccccgaatcattccttgaggaagcgcagatcatgaagaagctgaagcacgacaagctggtccagctctatgcagtggtgtctgaggagcccatctacatcgtcaccgagtatatgaacaaaggaagtttactggatttcttaaaagatggagaaggaagagctctgaaattaccaaatcttgtggacatggcagcacaggtggctgcaggaatggcttacatcgagcgcatgaattatatccatagagatctgcgatcagcaaacattctagtggggaatggactcatatgcaagattgctgacttcggattggcccgattgatagaagacaatgagtacacagcaagacaaggtgcaaagttccccatcaagtggacggcccccgaggcagccctgtacgggaggttcacaatcaagtctgacgtgtggtcttttggaatcttactcacagagctggtcaccaaaggaagagtgccatacccaggcatgaacaaccgggaggtgctggagcaggtggagcgaggctacaggatgccctgcccgcaggactgccccatctctctgcatgagctcatgatccactgctggaaaaaggagcctgaagaacgccccacttttgagtacttgcagagcttcctggaagactactttaccgcgacagagccccagtaccaacctggtgaaaacctgtaa

SEQ ID NO: 714 - DNA, 3768 bp, Homo sapiens
atggagctggcggccttgtgccgctgggggctcctcctcgccctcttgccccccggagccgcgagcacccaagtgtgcaccggcacagacatgaagctgcggctccctgccagtcccgagacccacctggacatgctccgccacctctaccagggctgccaggtggtgcagggaaacctggaactcacctacctgcccaccaatgccagcctgtccttcctgcaggatatccaggaggtgcagggctacgtgctcatcgctcacaaccaagtgaggcaggtcccactgcagaggctgcggattgtgcgaggcacccagctctttgaggacaactatgccctggccgtgctagacaatggagacccgctgaacaataccacccctgtcacaggggcctccccaggaggcctgcgggagctgcagcttcgaagcctcacagagatcttgaaaggaggggtcttgatccagcggaacccccagctctgctaccaggacacgattttgtggaaggacatcttccacaagaacaaccagctggctctcacactgatagacaccaaccgctctcgggcctgccacccctgttctccgatgtgtaagggctcccgctgctggggagagagttctgaggattgtcagagcctgacgcgcactgtctgtgccggtggctgtgcccgctgcaaggggccactgcccactgactgctgccatgagcagtgtgctgccggctgcacgggccccaagcactctgactgcctggcctgcctccacttcaaccacagtggcatctgtgagctgcactgcccagccctggtcacctacaacacagacacgtttgagtccatgcccaatcccgagggccggtatacattcggcgccagctgtgtgactgcctgtccctacaactacctttctacggacgtgggatcctgcaccctcgtctgccccctgcacaaccaagaggtgacagcagaggatggaacacagcggtgtgagaagtgcagcaagccctgtgcccgagtgtgctatggtctgggcatggagcacttgcgagaggtgagggcagttaccagtgccaatatccaggagtttgctggctgcaagaagatctttgggagcctggcatttctgccggagagctttgatggggacccagcctccaacactgccccgctccagccagagcagctccaagtgtttgagactctggaagagatcacaggttacctatacatctcagcatggccggacagcctgcctgacctcagcgtcttccagaacctgcaagtaatccggggacgaattctgcacaatggcgcctactcgctgaccctgcaagggctgggcatcagctggctggggctgcgctcactgagggaactgggcagtggactggccctcatccaccataacacccacctctgcttcgtgcacacggtgccctgggaccagctctttcggaacccgcaccaagctctgctccacactgccaaccggccagaggacgagtgtgtgggcgagggcctggcctgccaccagctgtgcgcccgagggcactgctggggtccagggcccacccagtgtgtcaactgcagccagttccttcggggccaggagtgcgtggaggaatgccgagtactgcaggggctccccagggagtatgtgaatgccaggcactgtttgccgtgccaccctgagtgtcagccccagaatggctcagtgacctgttttggaccggaggctgaccagtgtgtggcctgtgcccactataaggaccctcccttctgcgtggcccgctgccccagcggtgtgaaacctgacctctcctacatgcccatctggaagtttccagatgaggagggcgcatgccagccttgccccatcaactgcacccactcctgtgtggacctggatgacaagggctgccccgccgagcagagagccagccctctgacgtccatcgtctctgcggtggttggcattctgctggtcgtggtcttgggggtggtctttgggatcctcatcaagcgacggcagcagaagatccggaagtacacgatgcggagactgctgcaggaaacggagctggtggagccgctgacacctagcggagcgatgcccaaccaggcgcagatgcggatcctgaaagagacggagctgaggaaggtgaaggtgcttggatctggcgcttttggcacagtctacaagggcatctggatccctgatggggagaatgtgaaaattccagtggccatcaaagtgttgagggaaaacacatcccccaaagccaacaaagaaatcttagacgaagcatacgtgatggctggtgtgggctccccatatgtctcccgccttctgggcatctgcctgacatccacggtgcagctggtgacacagcttatgccctatggctgcctcttagaccatgtccgggaaaaccgcggacgcctgggctcccaggacctgctgaactggtgtatgcagattgccaaggggatgagctacctggaggatgtgcggctcgtacacagggacttggccgctcggaacgtgctggtcaagagtcccaaccatgtcaaaattacagacttcgggctggctcggctgctggacattgacgagacagagtaccatgcagatgggggcaaggtgcccatcaagtggatggcgctggagtccattctccgccggcggttcacccaccagagtgatgtgtggagttatggtgtgactgtgtgggagctgatgacttttggggccaaaccttacgatgggatcccagcccgggagatccctgacctgctggaaaagggggagcggctgccccagccccccatctgcaccattgatgtctacatgatcatggtcaaatgttggatgattgactctgaatgtcggccaagattccgggagttggtgtctgaattctcccgcatggccagggacccccagcgctttgtggtcatccagaatgaggacttgggcccagccagtcccttggacagcaccttctaccgctcactgctggaggacgatgacatgggggacctggtggatgctgaggagtatctggtaccccagcagggcttcttctgtccagaccctgccccgggcgctgggggcatggtccaccacaggcaccgcagctcatctaccaggagtggcggtggggacctgacactagggctggagccctctgaagaggaggcccccaggtctccactggcaccctccgaaggggctggctccgatgtatttgatggtgacctgggaatgggggcagccaaggggctgcaaagcctccccacacatgaccccagccctctacagcggtacagtgaggaccccacagtacccctgccctctgagactgatggctacgttgcccccctgacctgcagcccccagcctgaatatgtgaaccagccagatgttcggccccagcccccttcgccccgagagggccctctgcctgctgcccgacctgctggtgccactctggaaaggcccaagactctctccccagggaagaatggggtcgtcaaagacgtttttgcctttgggggtgccgtggagaaccccgagtacttgacaccccagggaggagctgcccctcagccccaccctcctcctgccttcagcccagccttcgacaacctctattactgggaccaggacccaccagagcggggggctccacccagcaccttcaaagggacacctacggcagagaacccagagtacctgggtctggacgtgccagtgtga

SEQ ID NO: 715 - DNA, 3768 bp, Homo sapiens
atggagctggcggccttgtgccgctgggggctcctcctcgccctcttgccccccggagccgcgagcacccaagtgtgcaccggcacagacatgaagctgcggctccctgccagtcccgagacccacctggacatgctccgccacctctaccagggctgccaggtggtgcagggaaacctggaactcacctacctgcccaccaatgccagcctgtccttcctgcaggatatccaggaggtgcagggctacgtgctcatcgctcacaaccaagtgaggcaggtcccactgcagaggctgcggattgtgcgaggcacccagctctttgaggacaactatgccctggccgtgctagacaatggagacccgctgaacaataccacccctgtcacaggggcctccccaggaggcctgcgggagctgcagcttcgaagcctcacagagatcttgaaaggaggggtcttgatccagcggaacccccagctctgctaccaggacacgattttgtggaaggacatcttccacaagaacaaccagctggctctcacactgatagacaccaaccgctctcgggcctgccacccctgttctccgatgtgtaagggctcccgctgctggggagagagttctgaggattgtcagagcctgacgcgcactgtctgtgccggtggctgtgcccgctgcaaggggccactgcccactgactgctgccatgagcagtgtgctgccggctgcacgggccccaagcactctgactgcctggcctgcctccacttcaaccacagtggcatctgtgagctgcactgcccagccctggtcacctacaacacagacacgtttgagtccatgcccaatcccgagggccggtatacattcggcgccagctgtgtgactgcctgtccctacaactacctttctacggacgtgggatcctgcaccctcgtctgccccctgcacaaccaagaggtgacagcagaggatggaacacagcggtgtgagaagtgcagcaagccctgtgcccgagtgtgctatggtctgggcatggagcacttgcgagaggtgagggcagttaccagtgccaatatccaggagtttgctggctgcaagaagatctttgggagcctggcatttctgccggagagctttgatggggacccagcctccaacactgccccgctccagccagagcagctccaagtgtttgagactctggaagagatcacaggttacctatacatctcagcatggccggacagcctgcctgacctcagcgtcttccagaacctgcaagtaatccggggacgaattctgcacaatggcgcctactcgctgaccctgcaagggctgggcatcagctggctggggctgcgctcactgagggaactgggcagtggactggccctcatccaccataacacccacctctgcttcgtgcacacggtgccctgggaccagctctttcggaacccgcaccaagctctgctccacactgccaaccggccagaggacgagtgtgtgggcgagggcctggcctgccaccagctgtgcgcccgagggcactgctggggtccagggcccacccagtgtgtcaactgcagccagttccttcggggccaggagtgcgtggaggaatgccgagtactgcaggggctccccagggagtatgtgaatgccaggcactgtttgccgtgccaccctgagtgtcagccccagaatggctcagtgacctgttttggaccggaggctgaccagtgtgtggcctgtgcccactataaggaccctcccttctgcgtggcccgctgccccagcggtgtgaaacctgacctctcctacatgcccatctggaagtttccagatgaggagggcgcatgccagccttgccccatcaactgcacccactcctgtgtggacctggatgacaagggctgccccgccgagcagagagccagccctctgacgtccatcatctctgcggtggttggcattctgctggtcgtggtcttgggggtggtctttgggatcctcatcaagcgacggcagcagaagatccggaagtacacgatgcggagactgctgcaggaaacggagctggtggagccgctgacacctagcggagcgatgcccaaccaggcgcagatgcggatcctgaaagagacggagctgaggaaggtgaaggtgcttggatctggcgcttttggcacagtctacaagggcatctggatccctgatggggagaatgtgaaaattccagtggccatcaaagtgttgagggaaaacacatcccccaaagccaacaaagaaatcttagacgaagcatacgtgatggctggtgtgggctccccatatgtctcccgccttctgggcatctgcctgacatccacggtgcagctggtgacacagcttatgccctatggctgcctcttagaccatgtccgggaaaaccgcggacgcctgggctcccaggacctgctgaactggtgtatgcagattgccaaggggatgagctacctggaggatgtgcggctcgtacacagggacttggccgctcggaacgtgctggtcaagagtcccaaccatgtcaaaattacagacttcgggctggctcggctgctggacattgacgagacagagtaccatgcagatgggggcaaggtgcccatcaagtggatggcgctggagtccattctccgccggcggttcacccaccagagtgatgtgtggagttatggtgtgactgtgtgggagctgatgacttttggggccaaaccttacgatgggatcccagcccgggagatccctgacctgctggaaaagggggagcggctgccccagccccccatctgcaccattgatgtctacatgatcatggtcaaatgttggatgattgactctgaatgtcggccaagattccgggagttggtgtctgaattctcccgcatggccagggacccccagcgctttgtggtcatccagaatgaggacttgggcccagccagtcccttggacagcaccttctaccgctcactgctggaggacgatgacatgggggacctggtggatgctgaggagtatctggtaccccagcagggcttcttctgtccagaccctgccccgggcgctgggggcatggtccaccacaggcaccgcagctcatctaccaggagtggcggtggggacctgacactagggctggagccctctgaagaggaggcccccaggtctccactggcaccctccgaaggggctggctccgatgtatttgatggtgacctgggaatgggggcagccaaggggctgcaaagcctccccacacatgaccccagccctctacagcggtacagtgaggaccccacagtacccctgccctctgagactgatggctacgttgcccccctgacctgcagcccccagcctgaatatgtgaaccagccagatgttcggccccagcccccttcgccccgagagggccctctgcctgctgcccaacctgctggtgccactctggaaaggcccaagactctctccccagggaagaatggggtcgtcaaagacgtttttgcctttgggggtgccgtggagaaccccgagtacttgacaccccagggaggagctgcccctcagccccaccctcctcctgccttcagcccagccttcgacaacctctattactgggaccaggacccaccagagcggggggctccacccagcaccttcaaagggacacctacggcagagaacccagagtacctgggtctggacgtgccagtgtga

SEQ ID NO: 716 - DNA, 3768 bp, Homo sapiens
atggagctggcggccttgtgccgctgggggctcctcctcgccctcttgccccccggagccgcgagcacccaagtgtgcaccggcacagacatgaagctgcggctccctgccagtcccgagacccacctggacatgctccgccacctctaccagggctgccaggtggtgcagggaaacctggaactcacctacctgcccaccaatgccagcctgtccttcctgcaggatatccaggaggtgcagggctacgtgctcatcgctcacaaccaagtgaggcaggtcccactgcagaggctgcggattgtgcgaggcacccagctctttgaggacaactatgccctggccgtgctagacaatggagacccgctgaacaataccacccctgtcacaggggcctccccaggaggcctgcgggagctgcagcttcgaagcctcacagagatcttgaaaggaggggtcttgatccagcggaacccccagctctgctaccaggacacgattttgtggaaggacatcttccacaagaacaaccagctggctctcacactgatagacaccaaccgctctcgggcctgccacccctgttctccgatgtgtaagggctcccgctgctggggagagagttctgaggattgtcagagcctgacgcgcactgtctgtgccggtggctgtgcccgctgcaaggggccactgcccactgactgctgccatgagcagtgtgctgccggctgcacgggccccaagcactctgactgcctggcctgcctccacttcaaccacagtggcatctgtgagctgcactgcccagccctggtcacctacaacacagacacgtttgagtccatgcccaatcccgagggccggtatacattcggcgccagctgtgtgactgcctgtccctacaactacctttctacggacgtgggatcctgcaccctcgtctgccccctgcacaaccaagaggtgacagcagaggatggaacacagcggtgtgagaagtgcagcaagccctgtgcccgagtgtgctatggtctgggcatggagcacttgcgagaggtgagggcagttaccagtgccaatatccaggagtttgctggctgcaagaagatctttgggagcctggcatttctgccggagagctttgatggggacccagcctccaacactgccccgctccagccagagcagctccaagtgtttgagactctggaagagatcacaggttacctatacatctcagcatggccggacagcctgcctgacctcagcgtcttccagaacctgcaagtaatccggggacgaattctgcacaatggcgcctactcgctgaccctgcaagggctgggcatcagctggctggggctgcgctcactgagggaactgggcagtggactggccctcatccaccataacacccacctctgcttcgtgcacacggtgccctgggaccagctctttcggaacccgcaccaagctctgctccacactgccaaccggccagaggacgagtgtgtgggcgagggcctggcctgccaccagctgtgcgcccgagggcactgctggggtccagggcccacccagtgtgtcaactgcagccagttccttcggggccaggagtgcgtggaggaatgccgagtactgcaggggctccccagggagtatgtgaatgccaggcactgtttgccgtgccaccctgagtgtcagccccagaatggctcagtgacctgttttggaccggaggctgaccagtgtgtggcctgtgcccactataaggaccctcccttctgcgtggcccgctgccccagcggtgtgaaacctgacctctcctacatgcccatctggaagtttccagatgaggagggcgcatgccagccttgccccatcaactgcacccactcctgtgtggacctggatgacaagggctgccccgccgagcagagagccagccctctgacgtccatcatctctgcggtggttggcattctgctggtcgtggtcttgggggtggtctttgggatcctcatcaagcgacggcagcagaagatccggaagtacacgatgcggagactgctgcaggaaacggagctggtggagccgctgacacctagcggagcgatgcccaaccaggcgcagatgcggatcctgaaagagacggagctgaggaaggtgaaggtgcttggatctggcgcttttggcacagtctacaagggcatctggatccctgatggggagaatgtgaaaattccagtggccatcaaagtgttgagggaaaacacatcccccaaagccaacaaagaaatcttagacgaagcatacgtgatggctggtgtgggctccccatatgtctcccgccttctgggcatctgcctgacatccacggtgcagctggtgacacagcttatgccctatggctgcctcttagaccatgtccgggaaaaccgcggacgcctgggctcccaggacctgctgaactggtgtatgcagattgccaaggggatgagctacctggaggatgtgcggctcgtacacagggacttggccgctcggaacgtgctggtcaagagtcccaaccatgtcaaaattacagacttcgggctggctcggctgctggacattgacgagacagagtaccatgcagatgggggcaaggtgcccatcaagtggatggcgctggagtccattctccgccggcggttcacccaccagagtgatgtgtggagttatggtgtgactgtgtgggagctgatgacttttggggccaaaccttacgatgggatcccagcccgggagatccctgacctgctggaaaagggggagcggctgccccagccccccatctgcaccattgatgtctacatgatcatggtcaaatgttggatgattgactctgaatgtcggccaagattccgggagttggtgtctgaattctcccgcatggccagggacccccagcgctttgtggtcatccagaatgaggacttgggcccagccagtcccttggacagcaccttctaccgctcactgctggaggacgatgacatgggggacctggtggatgctgaggagtatctggtaccccagcagggcttcttctgtccagaccctgccccgggcgctgggggcatggtccaccacaggcaccgcagctcatctaccaggagtggcggtggggacctgacactagggctggagccctctgaagaggaggcccccaggtctccactggcaccctccgaaggggctggctccgatgtatttgatggtgacctgggaatgggggcagccaaggggctgcaaagcctccccacacatgaccccagccctctacagcggtacagtgaggaccccacagtacccctgccctctgagactgatggctacgttgcccccctgacctgcagcccccagcctgaatatgtgaaccagccagatgttcggccccagcccccttcgccccgagagggccctctgcctgctgcccgacctgctggtgccactctggaaaggaccaagactctctccccagggaagaatggggtcgtcaaagacgtttttgcctttgggggtgccgtggagaaccccgagtacttgacaccccagggaggagctgcccctcagccccaccctcctcctgccttcagcccagccttcgacaacctctattactgggaccaggacccaccagagcggggggctccacccagcaccttcaaagggacacctacggcagagaacccagagtacctgggtctggacgtgccagtgtga

SEQ ID NO: 717 - DNA, 4029 bp, Homo sapiens
atgagggcgaacgacgctctgcaggtgctgggcttgcttttcagcctggcccggggctccgaggtgggcaactctcaggcagtgtgtcctgggactctgaatggcctgagtgtgaccggcgatgctgagaaccaataccagacactgtacaagctctacgagaggtgtgaggtggtgatggggaaccttgagattgtgctcacgggacacaatgccgacctctccttcctgcagtggattcgagaagtgacaggctatgtcctcgtggccatgaatgaattctctactctaccattgcccaacctccgcgtggtgcgagggacccaggtctacgatgggaagtttgccatcttcgtcatgttgaactataacaccaactccagccacgctctgcgccagctccgcttgactcagctcaccgagattctgtcagggggtgtttatattgagaagaacgataagctttgtcacatggacacaattgactggagggacatcgtgagggaccgagatgctgagatagtggtgaaggacaatggcagaagctgtcccccctgtcatgaggtttgcaaggggcgatgctggggtcctggatcagaagactgccagacattgaccaagaccatctgtgctcctcagtgtaatggtcactgctttgggcccaaccccaaccagtgctgccatgatgagtgtgccgggggctgctcaggccctcaggacacagactgctttgcctgccggcacttcaatgacagtggagcctgtgtacctcgctgtccacagcctcttgtctacaacaagctaactttccagctggaacccaatccccacaccaagtatcagtatggaggagtttgtgtagccagctgtccccataactttgtggtggatcaaacatcctgtgtcagggcctgtcctcctgacaagatggaagtagataaaaatgggctcaagatgtgtgagccttgtgggggactatgtcccaaagcctgtgagggaacaggctctgggagccgcttccagactgtggactcgagcaacattgatggatttgtgaactgcaccaagatcctgggcaacctggactttctgatcaccggcctcaatggagacccctggcacaagatccctgccctggacccagagaagctcaatgtcttccggacagtacgggagatcacaggttacctgaacatccagtcctggccgccccacatgcacaacttcagtgttttttccaatttgacaaccattggaggcagaagcctctacaaccggggcttctcattgttgatcatgaagaacttgaatgtcacatctctgggcttccgatccctgaaggaaattagtgctgggcgtatctatataagtgccaataggcagctctgctaccaccactctttgaactggaccaaggtgcttcgggggcctacggaagagcgactagacatcaagcataatcggccgcgcagagactgcgtggcagagggcaaagtgtgtgacccactgtgctcctctgggggatgctggggcccaggccctggtcagtgcttgtcctgtcgaaattatagccgaggaggtgtctgtgtgacccactgcaactttctgaatggggagcctcgagaatttgcccatgaggccgaatgcttctcctgccacccggaatgccaacccatggagggcactgccacatgcaatggctcgggctctgatacttgtgctcaatgtgcccattttcgagatgggccccactgtgtgagcagctgcccccatggagtcctaggtgccaagggcccaatctacaagtacccagatgttcagaatgaatgtcggccctgccatgagaactgcacccaggggtgtaaaggaccagagcttcaagactgtttaggacaaacactggtgctgatcggcaaaacccatctgacaatggctttgacagtgatagcaggattggtagtgattttcatgatgctgggcggcacttttctctactggcgtgggcgccggattcagaataaaagggctatgaggcgatacttggaacggggtgagagcatagagcctctggaccccagtgagaaggctaacaaagtcttggccagaatcttcaaagagacagagctaaggaagcttaaagtgcttggctcgggtgtctttggaactgtgcacaaaggagtgtggatccctgagggtgaatcaatcaagattccagtctgcattaaagtcattgaggacaagagtggacggcagagttttcaagctgtgacagatcatatgctggccattggcagcctggaccatgcccacattgtaaggctgctgggactatgcccagggtcatctctgcagcttgtcactcaatatttgcctctgggttctctgctggatcatgtgagacaacaccggggggcactggggccacagctgctgctcaactggggagtacaaattgccaagggaatgtactaccttgaggaacatggtatggtgcatagaaacctggctgcccgaaacgtgctactcaagtcacccagtcaggttcaggtggcagattttggtgtggctgacctgctgcctcctgatgataagcagctgctatacagtgaggccaagactccaattaagtggatggcccttgagagtatccactttgggaaatacacacaccagagtgatgtctggagctatggtgtgacagtttgggagttgatgaccttcggggcagagccctatgcagggctacgattggctgaagtaccagacctgctagagaagggggagcggttggcacagccccagatctgcacaattgatgtctacatggtgatggtcaagtgttggatgattgatgagaacattcgcccaacctttaaagaactagccaatgagttcaccaggatggcccgagacccaccacggtatctggtcataaagagagagagtgggcctggaatagcccctgggccagagccccatggtctgacaaacaagaagctagaggaagtagagctggagccagaactagacctagacctagacttggaagcagaggaggacaacctggcaaccaccacactgggctccgccctcagcctaccagttggaacacttaatcggccacgtgggagccagagccttttaagtccatcatctggatacatgcccatgaaccagggtaatcttggggagtcttgccaggagtctgcagtttctgggagcagtgaacggtgcccccgtccagtctctctacacccaatgccacggggatgcctggcatcagagtcatcagaggggcatgtaacaggctctgaggctgagctccaggagaaagtgtcaatgtgtaggagccggtgcaggagccggagcccacggccacgcggagatagcgcctaccattcccagcgccacagtctgctgactcctgttaccccactctccccacccgggttagaggaagaggatgtcaacggttatgtcatgccagatacacacctcaaaggtactccctcctcccgggaaggcaccctttcttcagtgggtctcagttctgtcctgggtactgaagaagaagatgaagatgaggagtatgaatacatgaaccggaggagaaggcacagtccacctcatccccctaggccaagttcccttgaggagctgggttatgagtacatggatgtggggtcagacctcagtgcctctctgggcagcacacagagttgcccactccaccctgtacccatcatgcccactgcaggcacaactccagatgaagactatgaatatatgaatcggcaacgagatggaggtggtcctgggggtgattatgcagccatgggggcctgcccagcatctgagcaagggtatgaagagatgagagcttttcaggggcctggacatcaggccccccatgtccattatgcccgcctaaaaactctacgtagcttagaggctacagactctgcctttgataaccctgattactggcatagcaggcttttccccaaggctaatgcccagagaacgtaa

SEQ ID NO: 718 - DNA, 3399 bp, Homo sapiens
atgggaatggcctgccttacgatgacagaaatggagggaacatccacctcttctatatatcagaatggtgatatttctggaaatgccaattctatgaagcaaatagatccagttcttcaggtgtatctttaccattcccttgggaaatctgaggcagattatctgacctttccatctggggagtatgttgcagaagaaatctgtattgctgcttctaaagcttgtggtatcacacctgtgtatcataatatgtttgctttaatgagtgaaacagaaaggatctggtatccacccaaccatgtcttccatatagatgagtcaaccaggcataatgtactctacagaataagattttactttcctcgttggtattgcagtggcagcaacagagcctatcggcatggaatatctcgaggtgctgaagctcctcttcttgatgactttgtcatgtcttacctctttgctcagtggcggcatgattttgtgcacggatggataaaagtacctgtgactcatgaaacacaggaagaatgtcttgggatggcagtgttagatatgatgagaatagccaaagaaaacgatcaaaccccactggccatctataactctatcagctacaagacattcttaccaaaatgtattcgagcaaagatccaagactatcatattttgacaaggaagcgaataaggtacagatttcgcagatttattcagcaattcagccaatgcaaagccactgccagaaacttgaaacttaagtatcttataaatctggaaactctgcagtctgccttctacacagagaaatttgaagtaaaagaacctggaagtggtccttcaggtgaggagatttttgcaaccattataataactggaaacggtggaattcagtggtcaagagggaaacataaagaaagtgagacactgacagaacaggatttacagttatattgcgattttcctaatattattgatgtcagtattaagcaagcaaaccaagagggttcaaatgaaagccgagttgtaactatccataagcaagatggtaaaaatctggaaattgaacttagctcattaagggaagctttgtctttcgtgtcattaattgatggatattatagattaactgcagatgcacatcattacctctgtaaagaagtagcacctccagccgtggttgaaaatatacaaagcaactgtcatggcccaatttcgatggattttgccattagtaaactgaagaaagcaggtaatcagactggactgtatgtacttcgatgcagtcctaaggactttaataaatattttttgacttttgctgtcgagcgagaaaatgtcattgaatataaacactgtttgattacaaaaaatgagaatgaagagtacaacctcagtgggacaaagaagaacttcagcagtcttaaagatcttttgaattgttaccagatggaaactgttcgctcagacaatataattttccagtttactaaatgctgtcccccaaagccaaaagataaatcaaaccttctagtcttcagaacgaatggtgtttctgatgtaccaacctcaccaacattacagaggcctactcatatgaaccaaatggtgtttcacaaaatcagaaatgaagatttgatatttaatgaaagccttggccaaggcacttttacaaagatttttaaaggcgtacgaagagaagtaggagactacggtcaactgcatgaaacagaagttcttttaaaagttctggataaagcacacagaaactattcagagtctttctttgaagcagcaagtatgatgagcaagctttctcacaagcatttggttttaaattatggagtatgtgtctgtggagacgagaatattctggttcaggagtttgtaaaatttggatcactagatacatatctgaaaaagaataaaaattgtataaatatattatggaaacttgaagttgctaaacagttggcatgggccatgcattttctagaagaaaacacccttattcatgggaatgtatgtgccaaaaatattctgcttatcagagaagaagacaggaagacaggaaatcctcctttcatcaaacttagtgatcctggcattagtattacagttttgccaaaggacattcttcaggagagaataccatgggtaccacctgaatgcattgaaaatcctaaaaatttaaatttggcaacagacaaatggagttttggtaccactttgtgggaaatctgcagtggaggagataaacctctaagtgctctggattctcaaagaaagctacaattttatgaagataggcatcagcttcctgcaccaaagtgggcagaattagcaaaccttataaataattgtatggattatgaaccagatttcaggccttctttcagagccatcatacgagatcttaacagtttgtttactccagattatgaactattaacagaaaatgacatgttaccaaatatgaggataggtgccctagggttttctggtgcctttgaagaccgggatcctacacagtttgaagagagacatttgaaatttctacagcaacttggcaagggtaattttgggagtgtggagatgtgccggtatgaccctctacaggacaacactggggaggtggtcgctgtaaaaaagcttcagcatagtactgaagagcacctaagagactttgaaagggaaattgaaatcctgaaatccctacagcatgacaacattgtaaagtacaagggagtgtgctacagtgctggtcggcgtaatctaaaattaattatggaatatttaccatatggaagtttacgagactatcttcaaaaacataaagaacggatagatcacataaaacttctgcagtacacatctcagatatgcaagggtatggagtatcttggtacaaaaaggtatatccacagggatctggcaacgagaaatatattggtggagaacgagaacagagttaaaattggagattttgggttaaccaaagtcttgccacaagacaaagaatactataaagtaaaagaacctggtgaaagtcccatattctggtatgctccagaatcactgacagagagcaagttttctgtggcctcagatgtttggagctttggagtggttctgtatgaacttttcacatacattgagaagagtaaaagtccaccagcggaatttatgcgtatgattggcaatgacaaacaaggacagatgatcgtgttccatttgatagaacttttgaagaataatggaagattaccaagaccagatggatgcccagatgagatctatatgatcatgacagaatgctggaacaataatgtaaatcaacgcccctcctttagggatctagctcttcgagtggatcaaataagggataacatggctggatga

SEQ ID NO: 719 - DNA, 3375 bp, Homo sapiens
atggcacctccaagtgaagagacgcccctgatccctcagcgttcatgcagcctcttgtccacggaggctggtgccctgcatgtgctgctgcccgctcggggccccgggcccccccagcgcctatctttctcctttggggaccacttggctgaggacctgtgcgtgcaggctgccaaggccagcggcatcctgcctgtgtaccactccctctttgctctggccacggaggacctgtcctgctggttccccccgagccacatcttctccgtggaggatgccagcacccaagtcctgctgtacaggattcgcttttacttccccaattggtttgggctggagaagtgccaccgcttcgggctacgcaaggatttggccagtgctatccttgacctgacagtcctggagcacctctttgcccagcaccgcagtgacctggtgagtgggcgcctccccgtgggcctcagtctcaaggagcagggtgagtgtctcagcctggccgtgttggacctggcccggatggcgcgagagcaggcccagcggccgggagagctgctgaagactgtcagctacaaggcctgcctacccccaagcctgcgcgacctgatccagggcctgagcttcgtgacgcggaggcgtattcggaggacggtgcgcagagccctgcgccgcgtggccgcctgccaggcagaccggcactcgctcatggccaagtacatcatggacctggagcggctggatccagccggggccgccgagaccttccacgtgggcctccctggggcccttggtggccacgacgggctggggctgctccgcgtggctggtgacggcggcatcgcctggacccagggagaacaggaggtcctccagcccttctgcgactttccagaaatcgtagacattagcatcaagcaggccccgcgcgttggcccggccggagagcaccgcctggtcactgttaccaggacagacaaccagattttagaggccgagttcccagggctgcccgaggctctgtcgttcgtggcgctcgtggacggctacttccggctgaccacggactcccagcacttcttctgcaaggaggtggcaccgccgaggctgctggaggaagtggccgagcagtgccacggccccatcactctggactttgccatcaacaagctcaagactgggggctcacgtcctggctcctatgttctccgccgcagcccccaggactttgacagcttcctcctcactgtctgtgtccagaacccccttggtcctgattataagggctgcctcatccggcgcagccccacaggaaccttccttctggttggcctcagccgaccccacagcagtcttcgagagctcctggcaacctgctgggatggggggctgcacgtagatggggtggcagtgaccctcacttcctgctgtatccccagacccaaagaaaagtccaacctgatcgtggtccagagaggtcacagcccacccacatcatccttggttcagccccaatcccaataccagctgagtcagatgacatttcacaagatccctgctgacagcctggagtggcatgagaacctgggccatgggtccttcaccaagatttaccggggctgtcgccatgaggtggtggatggggaggcccgaaagacagaggtgctgctgaaggtcatggatgccaagcacaagaactgcatggagtcattcctggaagcagcgagcttgatgagccaagtgtcgtaccggcatctcgtgctgctccacggcgtgtgcatggctggagacagcaccatggtgcaggaatttgtacacctgggggccatagacatgtatctgcgaaaacgtggccacctggtgccagccagctggaagctgcaggtggtcaaacagctggcctacgccctcaactatctggaggacaaaggcctgccccatggcaatgtctctgcccggaaggtgctcctggctcgggagggggctgatgggagcccgcccttcatcaagctgagtgaccctggggtcagccccgctgtgttaagcctggagatgctcaccgacaggatcccctgggtggcccccgagtgtctccgggaggcgcagacacttagcttggaagctgacaagtggggcttcggcgccacggtctgggaagtgtttagtggcgtcaccatgcccatcagtgccctggatcctgctaagaaactccaattttatgaggaccggcagcagctgccggcccccaagtggacagagctggccctgctgattcaacagtgcatggcctatgagccggtccagaggccctccttccgagccgtcattcgtgacctcaatagcctcatctcttcagactatgagctcctctcagaccccacacctggtgccctggcacctcgtgatgggctgtggaatggtgcccagctctatgcctgccaagaccccacgatcttcgaggagagacacctcaagtacatctcacagctgggcaagggcaactttggcagcgtggagctgtgccgctatgacccgctaggcgacaatacaggtgccctggtggccgtgaaacagctgcagcacagcgggccagaccagcagagggactttcagcgggagattcagatcctcaaagcactgcacagtgatttcattgtcaagtatcgtggtgtcagctatggcccgggccgccagagcctgcggctggtcatggagtacctgcccagcggctgcttgcgcgacttcctgcagcggcaccgcgcgcgcctcgatgccagccgcctccttctctattcctcgcagatctgcaagggcatggagtacctgggctcccgccgctgcgtgcaccgcgacctggccgcccgaaacatcctcgtggagagcgaggcacacgtcaagatcgctgacttcggcctagctaagctgctgccgcttgacaaagactactacgtggtccgcgagccaggccagagccccattttctggtatgcccccgaatccctctcggacaacatcttctctcgccagtcagacgtctggagcttcggggtcgtcctgtacgagctcttcacctactgcgacaaaagctgcagcccctcggccgagttcctgcggatgatgggatgtgagcgggatgtccccgccctctgccgcctcttggaactgctggaggagggccagaggctgccggcgcctcctgcctgccctgctgaggttcacgagctcatgaagctgtgctgggcccctagcccacaggaccggccatcattcagcgccctgggcccccagctggacatgctgtggagcggaagccgggggtgtgagactcatgccttcactgctcacccagagggcaaacaccactccctgtccttttcatag

SEQ ID NO: 720 - DNA, 3375 bp, Homo sapiens
atggcacctccaagtgaagagacgcccctgatccctcagcgttcatgcagcctcttgtccacggaggctggtgccctgcatgtgctgctgcccgctcggggccccgggcccccccagcgcctatctttctcctttggggaccacttggctgaggacctgtgcgtgcaggctgccaaggccagcggcatcctgcctgtgtaccactccctctttgctctggccacggaggacctgtcctgctggttccccccgagccacatcttctccgtggaggatgccagcacccaagtcctgctgtacaggattcgcttttacttccccaattggtttgggctggagaagtgccaccgcttcgggctacgcaaggatttggccagtgctatccttgacctgccagtcctggagcacctctttgcccagcaccgcagtgacctggtgagtgggcgcctccgcgtgggcctcagtctcaaggagcagggtgagtgtctcagcctggccgtgttggacctggcccggatggcgcgagagcaggcccagcggccgggagagctgctgaagactgtcagctacaaggcctgcctacccccaagcctgcgcgacctgatccagggcctgagcttcgtgacgcggaggcgtattcggaggacggtgcgcagagccctgcgccgcgtggccgcctgccaggcagaccggcactcgctcatggccaagtacatcatggacctggagcggctggatccagccggggccgccgagaccttccacgtgggcctccctggggcccttggtggccacgacgggctggggctgctccgcgtggctggtgacggcggcatcgcctggacccagggagaacaggaggtcctccagcccttctgcgactttccagaaatcgtagacattagcatcaagcaggccccgcgcgttggcccggccggagagcaccgcctggtcactgttaccaggacagacaaccagattttagaggccgagttcccagggctgcccgaggctctgtcgttcgtggcgctcgtggacggctacttccggctgaccacggactcccagcacttcttctgcaaggaggtggcaccgccgaggctgctggaggaagtggccgagcagtgccacggccccatcactctggactttgccatcaacaagctcaagactgggggctcacgtcctggctcctatgttctccgccgcagcccccaggactttgacagcttcctcctcactgtctgtgtccagaacccccttggtcctgattataagggctgcctcatccggcgcagccccacaggaaccttccttctggttggcctcagccgaccccacagcagtcttcgagagctcctggcaacctgctgggatggggggctgcacgtagatggggtggcagtgaccctcacttcctgctgtatccccagacccaaagaaaagtccaacctgatcgtggtccagagaggtcacagcccacccacatcatccttggttcagccccaatcccaataccagctgagtcagatgacatttcacaagatccctgctgacagcctggagtggcatgagaacctgggccatgggtccttcaccaagatttaccggggctgtcgccatgaggtggtggatggggaggcccgaaagacagaggtgctgctgaaggtcatggatgccaagcacaagaactgcatggagtcattcctggaagcagcgagcttgatgagccaagtgtcgtaccggcatctcgtgctgctccacggcgtgtgcatggctggagacagcaccatggtgcaggaatttgtacacctgggggccatagacatgtatctgcgaaaacgtggccacctggtgccagccagctggaagctgcaggtggtcaaacagctggcctacgccctcaactatctggaggacaaaggcctgccccatggcaatgtctctgcccggaaggtgctcctggctcgggagggggctgatgggagcccgcccttcatcaagctgagtgaccctggggtcagccccgctgtgttaagcctggagatgctcaccgacaggatcccctgggtggcccccgagtgtctccgggaggcgcagacacttagcttggaagctgacaagtggggcttcggcgccacggtctgggaagtgtttagtggcgtcaccatgcccatcagtgccctggatcctgctaagaaactccaattttatgaggaccggcagcagctgccggcccccaagtggacagagctggccctgctgattcaacagtgcatggcctatgagccggtccagaggccctccttccgagccgtcattcgtgacctcaatagcctcatctcttcagactatgagctcctctcagaccccacacctggtgccctggcacctcgtgatgggctgtggaatggtgcccagctctatgcctgccaagaccccacgatcttcgaggagagacacctcaagtacatctcacagctgggcaagggcaactttggcagcgtggagctgtgccgctatgacccgctaggcgacaatacaggtgccctggtggccgtgaaacagctgcagcacagcgggccagaccagcagagggactttcagcgggagattcagatcctcaaagcactgcacagtgatttcattgtcaagtatcgtggtgtcagctatggcccgggccgccagagcctgcggctggtcatggagtacctgcccagcggctgcttgcgcgacttcctgcagcggcaccgcgcgcgcctcgatgccagccgcctccttctctattcctcgcagatctgcaagggcatggagtacctgggctcccgccgctgcgtgcaccgcgacctggccgcccgaaacatcctcgtggagagcgaggcacacgtcaagatcgctgacttcggcctagctaagctgctgccgcttgacaaagactactacgtggtccgcgagccaggccagagccccattttctggtatgcccccgaatccctctcggacaacatcttctctcgccagtcagacgtctggagcttcggggtcgtcctgtacgagctcttcacctactgcgacaaaagctgcagcccctcggccgagttcctgcggatgatgggatgtgagcgggatgtccccgccctctgccgcctcttggaactgctggaggagggccagaggctgccggcgcctcctgcctgccctgctgaggttcacgagctcatgaagctgtgctgggcccctagcccacaggaccggccatcattcagcgccctgggcccccagctggacatgctgtggagcggaagccgggggtgtgagactcatgccttcactgctcacccagagggcaaacaccactccctgtccttttcatag

SEQ ID NO: 721 - DNA, 3375 bp, Homo sapiens
atggcacctccaagtgaagagacgcccctgatccctcagcgttcatgcagcctcttgtccacggaggctggtgccctgcatgtgctgctgcccgctcggggccccgggcccccccagcgcctatctttctcctttggggaccacttggctgaggacctgtgcgtgcaggctgccaaggccagcggcatcctgcctgtgtaccactccctctttgctctggccacggaggacctgtcctgctggttccccccgagccacatcttctccgtggaggatgccagcacccaagtcctgctgtacaggattcgcttttacttccccaattggtttgggctggagaagtgccaccgcttcgggctacgcaaggatttggccagtgctatccttgacctgccagtcctggagcacctctttgcccagcaccgcagtgacctggtgagtgggcgcctccccgtgggcctcagtctcaaggagcagggtgagtgtctcagcctggccgtgttggacctggcccggatggcgcgagagcaggcccagcggccgggagagctgctgaagactgtcagctacaaggcctgcctacccccaagcctgcgcgacctgatccagggcctgagcttcgtgacgcggaggcgtattcggaggacggtgcgcagagccctgcgccgcgtggccgcctgccaggcagaccggcactcgctcatggccaagtacatcatggacctggagcggctggatccagccggggccgccgagaccttccacgtgggcctccctggggcccttggtggccacgacgggctggggctgctccgcgtggctggtgacggcggcatcgcctggacccagggagaacaggaggtcctccagcccttctgcgactttccagaaatcgtagacattagcatcaagcaggccccgcgcgttggcccggccggagagcaccgcctggtcactgttaccaggacagacaaccagattttagaggccgagttcccagggctgcccgaggctctgtcgttcgtggcgctcgtggacggctacttccggctgaccacggactcccagcacttcttctgcaaggaggtggcaccgccgaggctgctggaggaagtggccgagcagtgccacggccccatcactctggactttgccatcaacaagctcaagactgggggctcacgtcctggctcctatgttctccgccgcagcccccaggactttgacagcttcctcctcactgtctgtgtccagaacccccttggtcctgattataagggctgcctcatccggcgcagccccacaggaaccttccttctggttggcctcagccgaccccacagcagtcttcgagagctcctggcaacctgctgggatggggggctgcacgtagatggggtggcagtgaccctcacttcctgctgtatccccagacccaaagaaaagtccaacctgatcgtggtccagagaggtcacagcccacccacatcatccttggttcagccccaatcccaataccagctgagtcagatgacatttcacaagatccctgctgacagcctggagtggcatgagaacctgggccatgggtccttcaccaagatttaccggggctgtcgccatgaggtggtggatggggaggcccgaaagacagaggtgctgctgaaggtcatggatgccaagcacaagaactgcatggagtcattcctggaagcagcgagcttgatgagccaagtgtcgtaccggcatctcgtgctgctccacggcgtgtgcatggctggagacagcaccatggtgcaggaatttgtacacctgggggccatagacatgtatctgcgaaaacgtggccacctggtgccagccagctggaagctgcaggtggtcaaacagctggcctacgccctcaactatctggaggacaaaggcctgccccatggcaatgtctctgcccggaaggtgctcctggctcgggagggggctgatgggagcccgcccttcatcaagctgagtgaccctggggtcagccccgctgtgttaagcctggagatgctcaccgacaggatcccctgggtggcccccgagtgtctccgggaggcgcagacacttagcttggaagctgacaagtggggcttcggcgccacggtctgggaagtgtttagtggcatcaccatgcccatcagtgccctggatcctgctaagaaactccaattttatgaggaccggcagcagctgccggcccccaagtggacagagctggccctgctgattcaacagtgcatggcctatgagccggtccagaggccctccttccgagccgtcattcgtgacctcaatagcctcatctcttcagactatgagctcctctcagaccccacacctggtgccctggcacctcgtgatgggctgtggaatggtgcccagctctatgcctgccaagaccccacgatcttcgaggagagacacctcaagtacatctcacagctgggcaagggcaactttggcagcgtggagctgtgccgctatgacccgctaggcgacaatacaggtgccctggtggccgtgaaacagctgcagcacagcgggccagaccagcagagggactttcagcgggagattcagatcctcaaagcactgcacagtgatttcattgtcaagtatcgtggtgtcagctatggcccgggccgccagagcctgcggctggtcatggagtacctgcccagcggctgcttgcgcgacttcctgcagcggcaccgcgcgcgcctcgatgccagccgcctccttctctattcctcgcagatctgcaagggcatggagtacctgggctcccgccgctgcgtgcaccgcgacctggccgcccgaaacatcctcgtggagagcgaggcacacgtcaagatcgctgacttcggcctagctaagctgctgccgcttgacaaagactactacgtggtccgcgagccaggccagagccccattttctggtatgcccccgaatccctctcggacaacatcttctctcgccagtcagacgtctggagcttcggggtcgtcctgtacgagctcttcacctactgcgacaaaagctgcagcccctcggccgagttcctgcggatgatgggatgtgagcgggatgtccccgccctctgccgcctcttggaactgctggaggagggccagaggctgccggcgcctcctgcctgccctgctgaggttcacgagctcatgaagctgtgctgggcccctagcccacaggaccggccatcattcagcgccctgggcccccagctggacatgctgtggagcggaagccgggggtgtgagactcatgccttcactgctcacccagagggcaaacaccactccctgtccttttcatag

SEQ ID NO: 722 - DNA, 4512 bp, Homo sapiens
atgccggggccgccggcgttgcggcggaggctgctgctgctgctgctggtcctcctgatcgccggcagtgctggggccgcgccacttgcgcaaacaggtgcaggggaggcgccacctgctgcagaagtttcctcatcttttgtgatcctgtgtgtgtgcagtttaataatattaatagtgttaattgcaaactgtgtatcctgctgtaaggacccagaaatagactttaaggaatttgaagataattttgatgatgagatagatttcacaccaccagcagaagacactccctctgttcagtccccagcagaggtcttcacactttcagtaccaaatatttcactcccagctccctcgcaattccagccttctgtagagggattgaagtctcaagttgcccgccacagtctaaactacatacaggaaattggaaatggctggtttggaaaggttctcttgggagagatttacacgggcactagcgtagcaagagtcatcgtgaaggagttaaaagcaagtgccaacccaaaggaacaagatacttttttgaaaaatggagaaccttactacattcttcagcatccaaatattcttcagtgtgttggacagtgcgtagaagcgattccctacctcctggtgtttgagttctgtgacttgggtgacctgaaggcgtatctgcgcagcgagcaggagcacatgcggggggactcacagaccatgctgctgcagaggatggcgtgcgaggtcgccgcggggctggccgccatgcacaagctgcacttcctgcacagtgatttagccctgcggaattgttttctcacctccgacttaaatgtgaaagtgggagattacggaataggattcagcaggtacaaggaggattatattgaaacagatgataaaaaagttttccctctgcgatggactgctccagaattagtaaccagctttcaagacagactgctaactgcagatcagactaagtatagtaatatctggtctctgggtgtgacactttgggagctttttgacaatgccgcacagccgtattcaaacctttccaacttagatgtcctcaaccaagtcattagagagagagacacaaaactcccgaagccccagctggagcagccctactctgatagatggtatgaagtcttacagttctgttggctgtcaccagaaaagagacccgcggctgaagatgtgcacaggctgctgacttacctgcggctgcagagccagcgggactcagaggtcgactttgaacagcagtggaacgctctgaagccgaacacaaacagcagagactcctccaacaatgctgcattcccaattctcgaccactttgccagggaccggctgggtcgtgaaatggaggaagtcctcaccgtgaccgaaaccagccagggcctgagcttcgagtatgtctgggaggccgctaagcacgaccactttgacgagcgcagccggggccacctggacgaaggcttgtcctacacgagcatcttctatccggttgaagtttttgagagttcgctttcagatcctgggcccggaaagcaagatgacagcggccaggatgtccccctgagggtccctggagtggttcctgtttttgatgcccacaacctttctgttggaagcgactattatatccagttagaagaaaaaagtggtagtaacttggagcttgattacccaccagcgctgctcacaaccgacatggataatccagaaaggactggccctgaactgtcccagctcacggcgctcaggagcgttgaacttgaggagtccagtacagatgaggacttcttccaaagcagtacagaccccaaagactctagcttaccaggggacttacacgtgaccagtggccccgagagccctttcaacaatatatttaatgatgtggacaaatcggaagatttgcccagtcaccaaaaaatattcgacttaatggaattaaacggagttcaagccgactttaaacctgccactttaagttccagtttggataaccccaaagagtcagtcataacaggccactttgagaaagaaaagccccgtaagatttttgacagtgagcctctctgcctatcagataatcttatgcaccaagataattttgatccattgaatgttcaagaattgtcagaaaactttttatttcttcaagagaaaaacttactaaaaggctcattgtccagcaaagaacacataaatgatcttcagacagaacttaagaatgctggttttactgaagctatgttagaaacgtcatgtagaaactctttagatactgagcttcagtttgctgaaaataagccaggcttgtctttgttgcaggaaaacgtaagcacaaagggtgacgatacagatgtcatgctcacaggtgacactttgagcacctcattgcagtcttccccggaagtgcaggtacctcctacctccttcgaaacagaagaaacgccccgtcgggtacccccagactcactcccaacacagggagaaacccagcccacgtgtttagatgttattgtcccggaggactgtctccaccaggacatcagtccagacgctgtgactgtcccggttgaaattctctcaactgatgccagaacccacagcctggataacaggtcccaggactctcctggcgagagtgaggagaccctgcgactcaccgaaagtgactctgttcttgctgatgacatccttgccagcagggtgagtgtagggagtagtctcccggaactgggacaggaattgcacaataaaccattttcggaagaccatcacagtcatcgccggctagagaaaaacttagaggctgtggagactttaaatcagctcaattctaaagacgcagcaaaagaagcaggcttggtgtctgccctctcctcggactcaaccagtcaggacagcctcctggaggacagcttgtcagcacccttcccagcctctgagccgtccctggaaaccccggactctctggagtcagtggatgtccacgaagcgctactggactctttaggatctcacactccccagaaactagtgccccccgataagccggcagacagtggctacgaaacagagaacttggagtctcccgagtggaccttgcatcccgctcccgagggcaccgcagactcagaaccagccaccacgggcgatggcggccacagcggtctgcctcccaacccggtcattgtcatctcagatgccggcgatggtcacagaggcacagaagtgacccctgagacgttcacagctggctcccagggttcataccgagactctgcgtacttctcagacaatgactctgagcccgagaaaaggtctgaggaggtcccgggaacctccccatccgccttggtgttggtacaggagcagcccctacccgagccagtcctccccgagcaaagtcctgctgcccaggatagctgcctggaagccagaaagagccagccagatgaaagttgtctgtctgctttgcacaactccagtgacctggaattaagagccacgccggagccagcacagactggtgttccccagcaggtgcatcccacggaagacgaggccagcagtccctggagtgtgctgaatgcagaacttagcagcggcgatgacttcgagacacaggacgatcgcccctgcaccctcgcttccacggggaccaacacgaacgaactccttgcctacaccaattctgcgctggacaagtccctgtccagccactccgagggcccgaagttgaaggagccggacatcgaagggaagtacctggggaaactcggggtgtcagggatgctcgacctctcagaggacgggatggatgcagacgaggaggacgaaaacagcgacgactcggacgaggacctgcgggccttcaacctgcatagcctcagctccgagtcggaggacgagaccgagcaccccgtgcccatcatcctcagcaacgaggacggaaggcacctgcggagtctgttgaagcccacagcggccaatgcccccgacccactgcccgaggactggaagaaggaaaagaaggcagtcacgtttttcgatgatgtcacagtctacctgtttgaccaggagaccccaaccaaagagctggggccctgtggaggagaggcgtgcggcccggacctgagcggcccagccccagcctcaggctctccctacctgagcaggtgcatcaactccgaaagctccaccgacgaagaaggtggtggctttgagtgggatgatgacttctccccagatccttttatgtcaaagacaacaagtaacctgctcagctccaagccttctctccaaacatccaagtacttttctccgccgccaccggcccggagcacggagcagagctggccgcactcggcgccttactcccggttctccatctctcccgccaacattgccagcttttccctcacacacctgaccgactcggacatcgagcagggcggaagcagcgaagacggagaaaaggactag

SEQ ID NO: 723 - DNA, 4512 bp, Homo sapiens
atgccggggccgccggcgttgcggcggaggctgctgctgctgctgctggtcctcctgatcgccggcagtgctggggccgcgccacttccgcaaacaggtgcaggggaggcgccacctgctgcagaagtttcctcatcttttgtgatcctgtgtgtgtgcagtttaataatattaatagtgttaattgcaaactgtgtatcctgctgtaaggacccagaaatagactttaaggaatttgaagataattttgatgatgagatagatttcacaccaccagcagaagacactccctctgttcagtccccagcagaggtcttcacactttcagtaccaaatatttcactcccagctccctcgcaattccagccttctgtagagggattgaagtctcaagttgcccgccacagtctaaactacatacaggaaattggaaatggctggtttggaaaggttctcttgggagagatttacacgggcactagcgtagcaagagtcatcgtgaaggagttaaaagcaagtgccaacccaaaggaacaagatacttttttgaaaaatggagaaccttactacattcttcagcatccaaatattcttcagtgtgttggacagtgcgtagaagcgattccctacctcctggtgtttgagttctgtgacttgggtgacctgaaggcgtatctgcgcagcgagcaggagcacatgcggggggactcacagaccatgctgctgcagaggatggcgtgcgaggtcgccgcggggctggccgccatgcacaagctgcacttcctgcacagtgatttagccctgcggaattgttttctcacctccgacttaaatgtgaaagtgggagattacggaataggattcagcaggtacaaggaggattatattgaaacagatgataaaaaagttttccctctgcgatggactgctccagaattagtaaccagctttcaagacagactgctaactgcagatcagactaagtatagtaatatctggtctctgggtgtgacactttgggagctttttgacaatgccgcacagccgtattcaaacctttccaacttagatgtcctcaaccaagtcattagagagagagacacaaaactcccgaagccccagctggagcagccctactctgatagatggtatgaagtcttacagttctgttggctgtcaccagaaaagagacccgcggctgaagatgtgcacaggctgctgacttacctgcggctgcagagccagcgggactcagaggtcgactttgaacagcagtggaacgctctgaagccgaacacaaacagcagagactcctccaacaatgctgcattcccaattctcgaccactttgccagggaccggctgggtcgtgaaatggaggaagtcctcaccgtgaccgaaaccagccagggcctgagcttcgagtatgtctgggaggccgctaagcacgaccactttgacgagcgcagccggggccacctggacgaaggcttgtcctacacgagcatcttctatccggttgaagtttttgagagttcgctttcagatcctgggcccggaaagcaagatgacagcggccaggatgtccccctgagggtccctggagtggttcctgtttttgatgcccacaacctttctgttggaagcgactattatatccagttagaagaaaaaagtggtagtaacttggagcttgattacccaccagcgctgctcacaaccgacatggataatccagaaaggactggccctgaactgtcccagctcacggcgctcaggagcgttgaacttgaggagtccagtacagatgaggacttcttccaaagcagtacagaccccaaagactctagcttaccaggggacttacacgtgaccagtggccccgagagccctttcaacaatatatttaatgatgtggacaaatcggaagatttgcccagtcaccaaaaaatattcgacttaatggaattaaacggagttcaagccgactttaaacctgccactttaagttccagtttggataaccccaaagagtcagtcataacaggccactttgagaaagaaaagccccgtaagatttttgacagtgagcctctctgcctatcagataatcttatgcaccaagataattttgatccattgaatgttcaagaattgtcagaaaactttttatttcttcaagagaaaaacttactaaaaggctcattgtccagcaaagaacacataaatgatcttcagacagaacttaagaatgctggttttactgaagctatgttagaaacgtcatgtagaaactctttagatactgagcttcagtttgctgaaaataagccaggcatgtctttgttgcaggaaaacgtaagcacaaagggtgacgatacagatgtcatgctcacaggtgacactttgagcacctcattgcagtcttccccggaagtgcaggtacctcctacctccttcgaaacagaagaaacgccccgtcgggtacccccagactcactcccaacacagggagaaacccagcccacgtgtttagatgttattgtcccggaggactgtctccaccaggacatcagtccagacgctgtgactgtcccggttgaaattctctcaactgatgccagaacccacagcctggataacaggtcccaggactctcctggcgagagtgaggagaccctgcgactcaccgaaagtgactctgttcttgctgatgacatccttgccagcagggtgagtgtagggagtagtctcccggaactgggacaggaattgcacaataaaccattttcggaagaccatcacagtcatcgccggctagagaaaaacttagaggctgtggagactttaaatcagctcaattctaaagacgcagcaaaagaagcaggcttggtgtctgccctctcctcggactcaaccagtcaggacagcctcctggaggacagcttgtcagcacccttcccagcctctgagccgtccctggaaaccccggactctctggagtcagtggatgtccacgaagcgctactggactctttaggatctcacactccccagaaactagtgccccccgataagccggcagacagtggctacgaaacagagaacttggagtctcccgagtggaccttgcatcccgctcccgagggcaccgcagactcagaaccagccaccacgggcgatggcggccacagcggtctgcctcccaacccggtcattgtcatctcagatgccggcgatggtcacagaggcacagaagtgacccctgagacgttcacagctggctcccagggttcataccgagactctgcgtacttctcagacaatgactctgagcccgagaaaaggtctgaggaggtcccgggaacctccccatccgccttggtgttggtacaggagcagcccctacccgagccagtcctccccgagcaaagtcctgctgcccaggatagctgcctggaagccagaaagagccagccagatgaaagttgtctgtctgctttgcacaactccagtgacctggaattaagagccacgccggagccagcacagactggtgttccccagcaggtgcatcccacggaagacgaggccagcagtccctggagtgtgctgaatgcagaacttagcagcggcgatgacttcgagacacaggacgatcgcccctgcaccctcgcttccacggggaccaacacgaacgaactccttgcctacaccaattctgcgctggacaagtccctgtccagccactccgagggcccgaagttgaaggagccggacatcgaagggaagtacctggggaaactcggggtgtcagggatgctcgacctctcagaggacgggatggatgcagacgaggaggacgaaaacagcgacgactcggacgaggacctgcgggccttcaacctgcatagcctcagctccgagtcggaggacgagaccgagcaccccgtgcccatcatcctcagcaacgaggacggaaggcacctgcggagtctgttgaagcccacagcggccaatgcccccgacccactgcccgaggactggaagaaggaaaagaaggcagtcacgtttttcgatgatgtcacagtctacctgtttgaccaggagaccccaaccaaagagctggggccctgtggaggagaggcgtgcggcccggacctgagcggcccagccccagcctcaggctctccctacctgagcaggtgcatcaactccgaaagctccaccgacgaagaaggtggtggctttgagtgggatgatgacttctccccagatccttttatgtcaaagacaacaagtaacctgctcagctccaagccttctctccaaacatccaagtacttttctccgccgccaccggcccggagcacggagcagagctggccgcactcggcgccttactcccggttctccatctctcccgccaacattgccagcttttccctcacacacctgaccgactcggacatcgagcagggcggaagcagcgaagacggagaaaaggactag

SEQ ID NO: 724 - DNA, 4512 bp, Homo sapiens
atgccggggccgccggcgttgcggcggaggctgctgctgctgctgctggtcctcctgatcgccggcagtgctggggccgcgccacttccgcaaacaggtgcaggggaggcgccacctgctgcagaagtttcctcatcttttgtgatcctgtgtgtgtgcagtttaataatattaatagtgttaattgcaaactgtgtatcctgctgtaaggacccagaaatagactttaaggaatttgaagataattttgatgatgagatagatttcacaccaccagcagaagacactccctctgttcagtccccagcagaggtcttcacactttcagtaccaaatatttcactcccagctccctcgcaattccagccttctgtagagggattgaagtctcaagttgcccgccacagtctaaactacatacaggaaattggaaatggctggtttggaaaggttctcttgggagagatttacacgggcactagcgtagcaagagtcatcgtgaaggagttaaaagcaagtgccaacccaaaggaacaagatacttttttgaaaaatggagaaccttactacattcttcagcatccaaatattcttcagtgtgttggacagtgcgtagaagcgattccctacctcctggtgtttgagttctgtgacttgggtgacctgaaggcgtatctgcgcagcgagcaggagcacatgcggggggactcacagaccatgctgctgcagaggatggcgtgcgaggtcgccgcggggctggccgccatgcacaagctgcacttcctgcacagtgatttagccctgcggaattgttttctcacctccgacttaaatgtgaaagtgggagattacggaataggattcagcaggtacaaggaggattatattgaaacagatgataaaaaagttttccctctgcgatggactgctccagaattagtaaccagctttcaagacagactgctaactgcagatcagactaagtatagtaatatctggtctctgggtgtgacactttgggagctttttgacaatgccgcacagccgtattcaaacctttccaacttagatgtcctcaaccaagtcattagagagagagacacaaaactcccgaagccccagctggagcagccctactctgatagatggtatgaagtcttacagttctgttggctgtcaccagaaaagagacccgcggctgaagatgtgcacaggctgctgacttacctgcggctgcagagccagcgggactcagaggtcgactttgaacagcagtggaacgctctgaagccgaacacaaacagcagagactcctccaacaatgctgcattcccaattctcgaccactttgccagggaccggctgggtcgtgaaatggaggaagtcctcaccgtgaccgaaaccagccagggcctgagcttcgagtatgtctgggaggccgctaagcacgaccactttgacgagcgcagccggggccacctggacgaaggcttgtcctacacgagcatcttctatccggttgaagtttttgagagttcgctttcagatcctgggcccggaaagcaagatgacagcggccaggatgtccccctgagggtccctggagtggttcctgtttttgatgcccacaacctttctgttggaagcgactattatatccagttagaagaaaaaagtggtagtaacttggagcttgattacccaccagcgctgctcacaaccgacatggataatccagaaaggactggccctgaactgtcccagctcacggcgctcaggagcgttgaacttgaggagtccagtacagatgaggacttcttccaaagcagtacagaccccaaagactctagcttaccaggggacttacacgtgaccagtggccccgagagccctttcaacaatatatttaatgatgtggacaaatcggaagatttgcccagtcaccaaaaaatattcgacttaatggaattaaacggagttcaagccgactttaaacctgccactttaagttccagtttggataaccccaaagagtcagtcataacaggccactttgagaaagaaaagccccgtaagatttttgacagtgagcctctctgcctatcagataatcttatgcaccaagataattttgatccattgaatgttcaagaattgtcagaaaactttttatttcttcaagagaaaaacttactaaaaggctcattgtccagcaaagaacacataaatgatcttcagacagaacttaagaatgctggttttactgaagctatgttagaaacgtcatgtagaaactctttagatactgagcttcagtttgctgaaaataagccaggcttgtctttgttgcaggaaaacgtaagcacaaagggtgacgatacagatgtcatgctcacaggtgacactttgagcacctcattgcagtcttccccggaagtgcaggtacctcctacctccttcgaaacagaagaaacgccccgtcgggtacccccagactcactcccaacacagggagaaacccagcccacgtgtttagatgttattgtcccggaggactgtctccaccaggacatcagtccagacgctgtgactgtcccggttgaaattctctcaactgatgccagaacccacagcctggataacaggtcccaggactctcctggcgagagtgaggagaccctgcgactcaccgaaagtgactctgttcttgctgatgacatccttgccatcagggtgagtgtagggagtagtctcccggaactgggacaggaattgcacaataaaccattttcggaagaccatcacagtcatcgccggctagagaaaaacttagaggctgtggagactttaaatcagctcaattctaaagacgcagcaaaagaagcaggcttggtgtctgccctctcctcggactcaaccagtcaggacagcctcctggaggacagcttgtcagcacccttcccagcctctgagccgtccctggaaaccccggactctctggagtcagtggatgtccacgaagcgctactggactctttaggatctcacactccccagaaactagtgccccccgataagccggcagacagtggctacgaaacagagaacttggagtctcccgagtggaccttgcatcccgctcccgagggcaccgcagactcagaaccagccaccacgggcgatggcggccacagcggtctgcctcccaacccggtcattgtcatctcagatgccggcgatggtcacagaggcacagaagtgacccctgagacgttcacagctggctcccagggttcataccgagactctgcgtacttctcagacaatgactctgagcccgagaaaaggtctgaggaggtcccgggaacctccccatccgccttggtgttggtacaggagcagcccctacccgagccagtcctccccgagcaaagtcctgctgcccaggatagctgcctggaagccagaaagagccagccagatgaaagttgtctgtctgctttgcacaactccagtgacctggaattaagagccacgccggagccagcacagactggtgttccccagcaggtgcatcccacggaagacgaggccagcagtccctggagtgtgctgaatgcagaacttagcagcggcgatgacttcgagacacaggacgatcgcccctgcaccctcgcttccacggggaccaacacgaacgaactccttgcctacaccaattctgcgctggacaagtccctgtccagccactccgagggcccgaagttgaaggagccggacatcgaagggaagtacctggggaaactcggggtgtcagggatgctcgacctctcagaggacgggatggatgcagacgaggaggacgaaaacagcgacgactcggacgaggacctgcgggccttcaacctgcatagcctcagctccgagtcggaggacgagaccgagcaccccgtgcccatcatcctcagcaacgaggacggaaggcacctgcggagtctgttgaagcccacagcggccaatgcccccgacccactgcccgaggactggaagaaggaaaagaaggcagtcacgtttttcgatgatgtcacagtctacctgtttgaccaggagaccccaaccaaagagctggggccctgtggaggagaggcgtgcggcccggacctgagcggcccagccccagcctcaggctctccctacctgagcaggtgcatcaactccgaaagctccaccgacgaagaaggtggtggctttgagtgggatgatgacttctccccagatccttttatgtcaaagacaacaagtaacctgctcagctccaagccttctctccaaacatccaagtacttttctccgccgccaccggcccggagcacggagcagagctggccgcactcggcgccttactcccggttctccatctctcccgccaacattgccagcttttccctcacacacctgaccgactcggacatcgagcagggcggaagcagcgaagacggagaaaaggactag

SEQ ID NO: 725 - DNA, 1524 bp, Homo sapiens
atggcggggcgaggctctctggtttcctggcgggcatttcacggctgtgattctgctgaggaacttccccgggtgagcccccgcttcctccgagcctggcacccccctcccgtctcagccaggatgccaacgaggcgctgggccccgggcacccagtgtatcaccaaatgcgagcacacccgccccaagccaggggagctggccttccgcaagggcgacgtggtcaccatcctggaggcctgcgagaacaagagctggtaccgcgtcaagcaccacaccagtggacaggaggggctgctggcagctggggcgctgcgggagcgggaggccctctccgcagaccccaagctcagcctcatgccgtggttccacgggaagatctcgggccaggaggctgtccagcagctgcagcctcccgaggatgggctgttcctggtgcgggagtccgcgcgccaccccggcgactacgtcctgtgcgtgagctttggccgcgacgtcatccactaccgcgtgctgcaccgcgacggccacctcacaatcgatgaggccgtgttcttctgcaacctcatggacatggtggagcattacagcaaggacaagggcgctatctgcaccaagctggtgagaccaaagcggaaacacgggaccaagtcggccgaggaggagctggccagggcgggctggttactgaacctgcagcatttgacattgggagcacagatcggagagggagagtttggagctgtcctgcagggtgagtacctggggcaaaaggtggccgtgaagaatatcaagtgtgatgtgacagcccaggccttcctggacgagacggccgtcatgacgaagatgcaacacgagaacctggtgcgtctcctgggcgtgatcctgcaccaggggctgtacattgtcatggagcacgtgagcaagggcaacctggtgaactttctgcggacccggggtcgagccctcgtgaacaccgctcagctcctgcagttttctctgcacgtggccgagggcatggagtacctggagagcaagaagcttgtgcaccgcgacctggccgcccgcaacatcctggtctcagaggacctggtggccaaggtcagcgactttggcctggccaaagccgagcggaaggggctagactcaagccggctgcccgtcaagtggacggcgcccgaggctctcaaacacgggaagttcaccagcaagtcggatgtctggagttttggggtgctgctctgggaggtcttctcatatggacgggctccgtaccctaaaatgtcactgaaagaggtgtcggaggccgtggagaaggggtaccgcatggaaccccccgagggctgtccaggccccgtgcacgtcctcatgagcagctgctgggaggcagagcccgcccgccggccacccttccgcaaactggccgagaagctggcccgggagctacgcagtgcaggtgccccagcctccgtctcagggcaggacaccgacggctccacctcgccccgaagccaggagccctga

SEQ ID NO: 726 - DNA, 3000 bp, Homo sapiens
atggggccggccccgctgccgctgctgctgggcctcttcctccccgcgctctggcgtagagctatcactgaggcaagggaagaagccaagccttacccgctattcccgggaccttttccagggagcctgcaaactgaccacacaccgctgttatcccttcctcacgccagtgggtaccagcctgccttgatgttttcaccaacccagcctggaagaccacatacaggaaacgtagccattccccaggtgacctctgtcgaatcaaagcccctaccgcctcttgccttcaaacacacagttggacacataatactttctgaacataaaggtgtcaaatttaattgctcaatcagtgtacctaatatataccaggacaccacaatttcttggtggaaagatgggaaggaattgcttggggcacatcatgcaattacacagttttatccagatgatgaagttacagcaataatcgcttccttcagcataaccagtgtgcagcgttcagacaatgggtcgtatatctgtaagatgaaaataaacaatgaagagatcgtgtctgatcccatctacatcgaagtacaaggacttcctcactttactaagcagcctgagagcatgaatgtcaccagaaacacagccttcaacctcacctgtcaggctgtgggcccgcctgagcccgtcaacattttctgggttcaaaacagtagccgtgttaacgaacagcctgaaaaatccccctccgtgctaactgttccaggcctgacggagatggcggtcttcagttgtgaggcccacaatgacaaagggctgaccgtgtccaagggagtgcagatcaacatcaaagcaattccctccccaccaactgaagtcagcatccgtaacagcactgcacacagcattctgatctcctgggttcctggttttgatggatactccccgttcaggaattgcagcattcaggtcaaggaagctgatccgctgagtaatggctcagtcatgatttttaacacctctgccttaccacatctgtaccaaatcaagcagctgcaagccctggctaattacagcattggtgtttcctgcatgaatgaaataggctggtctgcagtgagcccttggattctagccagcacgactgaaggagccccatcagtagcacctttaaatgtcactgtgtttctgaatgaatctagtgataatgtggacatcagatggatgaagcctccgactaagcagcaggatggagaactggtgggctaccggatatcccacgtgtggcagagtgcagggatttccaaagagctcttggaggaagttggccagaatggcagccgagctcggatctctgttcaagtccacaatgctacgtgcacagtgaggattgcagccgtcaccagagggggagttgggcccttcagtgatccagtgaaaatatttatccctgcacacggttgggtagattatgccccctcttcaactccggcgcctggcaacgcagatcctgtgctcatcatctttggctgcttttgtggatttattttgattgggttgattttatacatctccttggccatcagaaaaagagtccaggagacaaagtttgggaatgcattcacagaggaggattctgaattagtggtgaattatatagcaaagaaatccttctgtcggcgagccattgaacttaccttacatagcttgggagtcagtgaggaactacaaaataaactagaagatgttgtgattgacaggaatcttctaattcttggaaaaattctgggtgaaggagagtttgggtctgtaatggaaggaaatcttaagcaggaagatgggacctctctgaaagtggcagtgaagaccatgaagttggacaactcttcacagcgggagatcgaggagtttctcagtgaggcagcgtgcatgaaagacttcagccacccaaatgtcattcgacttctaggtgtgtgtatagaaatgagctctcaaggcatcccaaagcccatggtaattttacccttcatgaaatacggggacctgcatacttacttactttattcccgattggagacaggaccaaagcatattcctctgcagacactattgaagttcatggtggatattgccctgggaatggagtatctgagcaacaggaattttcttcatcgagatttagctgctcgaaactgcatgttgcgagatgacatgactgtctgtgttgcggacttcggcctctctaagaagatttacagtggcgattattaccgccaaggccgcattgctaagatgcctgttaaatggatcgccatagaaagtcttgcagaccgagtctacacaagtaaaagtgatgtgtgggcatttggcgtgaccatgtgggaaatagctacgcggggaatgactccctatcctggggtccagaaccatgagatgtatgactatcttctccatggccacaggttgaagcagccccaagactgcctggatgaactgtatgaaataatgtactcttgctggagaaccgatcccttagaccgccccaccttttcagtattgaggctgcagctagaaaaactcttagaaagtttgcctgacgttcggaaccaagcagacgttatttacgtcaatacacagttgctggagagctctgagggcctggcccagggctccacccttgctccactggacttgaacatcgaccctgactctataattgcctcctgcactccccgcgctgccatcagtgtggtcacagcagaagttcatgacagcaaacctcatgaaggacggtacatcctgaatgggggcagtgaggaatgggaagatctgacttctgccccctctgctgcagtcacagctgaaaagaacagtgttttaccgggggagagacttgttaggaatggggtctcctggtcccattcgagcatgctgcccttgggaagctcattgcccgatgaacttttgtttgctgacgactcctcagaaggctcagaagtcctgatgtga

SEQ ID NO: 727 - DNA, 3000 bp, Homo sapiens
atggggccggccccgctgccgctgctgctgggcctcttcctccccgcgctctggcgtagagctatcactgaggcaagggaagaagccaagccttacccgctattcccgggaccttttccagggagcctgcaaactgaccacacaccgctgttatcccttcctcacgccagtgggtaccagcctgccttgatgttttcaccaacccagcctggaagaccacatacaggaaacgtagccattccccaggtgacctctgtcgaatcaaagcccctaccgcctcttgccttcaaacacacagttggacacataatactttctgaacataaaggtgtcaaatttaattgctcaatcagtgtacctaatatataccaggacaccacaatttcttggtggaaagatgggaaggaattgcttggggcacatcatgcaattacacagttttatccagatgatgaagttacagcaataatcgcttccttcagcataaccagtgtgcagcgttcagacaatgggtcgtatatctgtaagatgaaaataaacaatgaagagatcgtgtctgatcccatctacatcgaagtacaaggacttcctcactttactaagcagcctgagagcatgaatgtcaccagaaacacagccttcaacctcacctgtcaggctgtgggcccgcctgagcccgtcaacattttctgggttcaaaacagtagccgtgttaacgaacagcctgaaaaatccccctccgtgctaactgttccaggcctgacggagatggcggtcttcagttgtgaggcccacaatgacaaagggctgaccgtgtccaagggagtgcagatcaacatcaaagcaattccctccccaccaactgaagtcagcatccgtaacagcactgcacacagcattctgatctcctgggttcctggttttgatggatactccccgttcaggaattgcagcattcaggtcaaggaagctgatccgctgagtaatggctcagtcatgatttttaacacctctgccttaccacatctgtaccaaatcaagcagctgcaagccctggctaattacagcattggtgtttcctgcatgaatgaaataggctggtctgcagtgagcccttggattctagccagcacgactgaaggagccccatcagtagcacctttaaatgtcactgtgtttctgaatgaatctagtgataatgtggacatcagatggatgaagcctccgactaagcagcaggatggagaactggtgggctaccggatatcccacgtgtggcagagtgcagggatttccaaagagctcttggaggaagttggccagaatggcagccgagctcggatctctgttcaagtccacaatgctacgtgcacagtgaggattgcagccgtcaccagagggggagttgggcccttcagtgatccagtgaaaatatttatccctgcacacggttgggtagattatgccccctcttcaactccggcgcctggcaacgcagatcctgtgctcatcatctttggctgcttttgtggatttattttgattgggttgattttatacatctccttggccatcagaaaaagagtccaggagacaaagtttgggaatgcattcacagaggaggattctgaattagtggtgaattatatagcaaagaaatccttctgtcggcgagccattgaacttaccttacatagcttgggagtcagtgaggaactacaaaataaactagaagatgttgtgattgacaggaatcttctaattcttggaaaaattctgggtgaaggagagtttgggtctgtaatggaaggaaatcttaagcaggaagatgggacctctctgaaagtggcagtgaagaccatgaagttggacaactcttcacagcgggagatcgaggagtttctcagtgaggcagcgtgcatgaaagacttcagccacccaaatgtcattcgacttctaggtgtgtgtatagaaatgagctctcaaggcatcccaaagcccatggtaattttacccttcatgaaatacggggacctgcatacttacttactttattcccgattggagacaggaccaaagcatattcctctgcagacactattgaagttcatggtggatattgccctgggaatggagtatctgagcaacaggaattttcttcatcgagatttagctgctcgaaactgcatgttgcgagatgacatgactgtctgtgttgcggacttcggcctctctaagaagatttacagtggcgattattaccgccaaggccgcattgctaagatgcctgttaaatggatcgccatagaaagtcttgcagaccgagtctacacaagtaaaagtgatgtgtgggcatttggcgtgaccatgtgggaaatagctacgcggggaatgactccctatcctggggtccagaaccatgagatgtatgactatcttctccatggccacaggttgaagcagcccgaagactgcctggatgaactgtatgaaataatgtactcttgctggagaaccgatcccttagaccgccccaccttttcagtattgaggctgcagctagaaaaactcttagaaagtttgcctgacgttcggaaccaagcagacattatttacgtcaatacacagttgctggagagctctgagggcctggcccagggctccacccttgctccactggacttgaacatcgaccctgactctataattgcctcctgcactccccgcgctgccatcagtgtggtcacagcagaagttcatgacagcaaacctcatgaaggacggtacatcctgaatgggggcagtgaggaatgggaagatctgacttctgccccctctgctgcagtcacagctgaaaagaacagtgttttaccgggggagagacttgttaggaatggggtctcctggtcccattcgagcatgctgcccttgggaagctcattgcccgatgaacttttgtttgctgacgactcctcagaaggctcagaagtcctgatgtga

SEQ ID NO: 728 - DNA, 4227 bp, Homo sapiens
atgaaggcccccgctgtgcttgcacctggcatcctcgtgctcctgtttaccttggtgcagaggagcaatggggagtgtaaagaggcactagcaaagtccgagatgaatgtgaatatgaagtatcagcttcccaacttcaccgcggaaacacccatccagaatgtcattctacatgagcatcacattttccttggtgccactaactacatttatgttttaaatgaggaagaccttcagaaggttgctgagtacaagactgggcctgtgctggaacacccagattgtttcccatgtcaggactgcagcagcaaagccaatttatcaggaggtgtttggaaagataacatcaacatggctctagttgtcgacacctactatgatgatcaactcattagctgtggcagcgtcaacagagggacctgccagcgacatgtctttccccacaatcatactgctgacatacagtcggaggttcactgcatattctccccacagatagaagagcccagccagtgtcctgactgtgtggtgagcgccctgggagccaaagtcctttcatctgtaaaggaccggttcatcaacttctttgtaggcaataccataaattcttcttatttcccagatcatccattgcattcgatatcagtgagaaggctaaaggaaacgaaagatggttttatgtttttgacggaccagtcctacattgatgttttacctgagttcagagattcttaccccattaagtatgtccatgcctttgaaagcaacaattttatttacttcttgacggtccaaagggaaactctagatgctcagacttttcacacaagaataatcaggttctgttccataaactctggattgcattcctacatggaaatgcctctggagtgtattctcacagaaaagagaaaaaagagatccacaaagaaggaagtgtttaatatacttcaggctgcgtatgtcagcaagcctggggcccagcttgctagacaaataggagccagcctgaatgatgacattcttttcggggtgttcgcacaaagcaagccagattctgccgaaccaatggatcgatctgccatgtgtgcattccctatcaaatatgtcaacgacttcttcagcaagatcgtcaacaaaaacaatgtgagatgtctccagcatttttacggacccaatcatgagcactgctttaataggacacttctgagaaattcatcaggctgtgaagcgcgccgtgatgaatatcgaacagagtttaccacagctttgcagcgcgttgacttattcatgggtcaattcagcgaagtcctcttaacatctatatccaccttcattaaaggagacctcaccatagctaatcttgggacatcagagggtcgcttcatgcaggttgtggtttctcgatcaggaccatcaacccctcatgtgaattttctcctggactcccatccagtgtctccagaagtgattgtggagcatacattaaaccaaaatggctacacactggttatcactgggaagaagatcacgaagatcccattgaatggcttgggctgcagacatttccagtcctgcagtcaatgcctctctgccccaccctttgttcagtgtggctggtgccacgacaaatgtgtgcgatcggaggaatgcctgagcgggacatggactcaacagatctgtctgcctgcaatctacaaggttttcccaaatagtgcaccccttgaaggagggacaaggctgaccatatgtggctgggactttggatttcggaggaataataaatttgatttaaagaaaactagagttctccttggaaatgagagctgcaccttgactttaagtgagagcacgatgaatacattgaaatgcacagttggtcctgccatgaataagcatttcaatatgtccataattatttcaaatggccacgggacaacacaatacagtacattctcctatgtggatcctgtaataacaagtatttcgccgaaatacggtcctatggctggtggcactttacttactttaactggaaattacctaaacagtgggaattctagacacatttcaattggtggaaaaacatgtactttaaaaagtgtgtcaaacagtattcttgaatgttataccccagcccaaaccatttcaactgagtttgctgttaaattgaaaattgacttagccaaccgagagacaagcatcttcagttaccgtgaagatcccattgtctatgaaattcatccaaccaaatcttttattagtacttggtggaaagaacctctcaacattgtcagttttctattttgctttgccagtggtgggagcacaataacaggtgttgggaaaaacctgaattcagttagtgtcccgagaatggtcataaatgtgcatgaagcaggaaggaactttacagtggcatgtcaacatcgctctaattcagagataatctgttgtaccactccttccctgcaacagctgaatctgcaactccccctgaaaaccaaagcctttttcatgttagatgggatcctttccaaatactttgatctcatttatgtacataatcctgtgtttaagccttttgaaaagccagtgatgatctcaatgggcaatgaaaatgtactggaaattaagggaaatgatattgaccctgaagcagttaaaggtgaagtgttaaaagttggaaataagagctgtgagaatatacacttacattctgaagccgttttatgcacggtccccaatgacctgctgaaattgaacagcgagctaaatatagagtggaagcaagcaatttcttcaaccgtccttggaaaagtaatagttcaaccagatcagaatttcacaggattgattgctggtgttgtctcaatatcaacagcactgttattactacttgggtttttcctgtggctgaaaaagagaaagcaaattaaagatctgggcagtgaattagttcgctacgatgcaagagtacacactcctcatttggataggcttgtaagtgcccgaagtgtaagcccaactacagaaatggtttcaaatgaatctgtagactaccgagctacttttccagaagatcagtttcctaattcatctcagaacggttcatgccgacaagtgcagtatcctctgacagacatgtcccccatcctaactagtggggactctgatatatccagtccattactgcaaaatactgtccacattgacctcagtgctctaaatccagagctggtccaggcagtgcagcatgtagtgattgggcccagtagcctgattgtgcatttcaatgaagtcataggaagagggcattttggttgtgtatatcatgggactttgttggacaatgatggcaagaaaattcactgtgctgtgaaatccttgaacagaatcactgacataggagaagtttcccaatttctgaccgagggaatcatcatgaaagattttagtcatcccaatgtcctctcgctcctgggaatctgcctgcgaagtgaagggtctccgctggtggtcctaccatacatgaaacatggagatcttcgaaatttcattcgaaatgagactcataatccaactgtaaaagatcttattggctttggtcttcaagtagccaaagcgatgaaatatcttgcaagcaaaaagtttgtccacagagacttggctgcaagaaactgtatgctggatgaaaaattcacagtcaaggttgctgattttggtcttgccagagacatgtatgataaagaatactatagtgtacacaacaaaacaggtgcaaagctgccagtgaagtggatggctttggaaagtctgcaaactcaaaagtttaccaccaagtcagatgtgtggtcctttggcgtcgtcctctgggagctgatgacaagaggagccccaccttatcctgacgtaaacacctttgatataactgtttacttgttgcaagggagaagactcctacaacccgaatactgcccagaccccttatatgaagtaatgctaaaatgctggcaccctaaagccgaaatgcgcccatccttttctgaactggtgtcccggatatcagcgatcttctctactttcattggggagcactatgtccatgtgaacgctacttatgtgaacgtaaaatgtgtcgctccgtatccttctctgttgtcatcagaagataacgctgatgatgaggtggacacacgaccagcctccttctgggagacatcatag

SEQ ID NO: 729 - DNA, 4227 bp, Homo sapiens
atgaaggcccccgctgtgcttgcacctggcatcctcgtgctcctgtttaccttggtgcagaggagcaatggggagtgtaaagaggcactagcaaagtccgagatgaatgtgaatatgaagtatcagcttcccaacttcaccgcggaaacacccatccagaatgtcattctacatgagcatcacattttccttggtgccactaactacatttatgttttaaatgaggaagaccttcagaaggttgctgagtacaagactgggcctgtgctggaacacccagattgtttcccatgtcaggactgcagcagcaaagccaatttatcaggaggtgtttggaaagataacatcaacatggctctagttgtcgacacctactatgatgatcaactcattagctgtggcagcgtcaacagagggacctgccagcgacatgtctttccccacaatcatactgctgacatacagtcggaggttcactgcatattctccccacagatagaagagcccagccagtgtcctgactgtgtggtgagcgccctgggagccaaagtcctttcatctgtaaaggaccggttcatcaacttctttgtaggcaataccataaattcttcttatttcccagatcatccattgcattcgatatcagtgagaaggctaaaggaaacgaaagatggttttatgtttttgacggaccagtcctacattgatgttttacctgagttcagagattcttaccccattaagtatgtccatgcctttgaaagcaacaattttatttacttcttgacggtccaaagggaaactctagatgctcagacttttcacacaagaataatcaggttctgttccataaactctggattgcattcctacatggaaatgcctctggagtgtattctcacagaaaagagaaaaaagagatccacaaagaaggaagtgtttaatatacttcaggctgcgtatgtcagcaagcctggggcccagcttgctagacaaataggagccagcctgaatgatgacattcttttcggggtgttcgcacaaagcaagccagattctgccgaaccaatggatcgatctgccatgtgtgcattccctatcaaatatgtcaacgacttcttcaacaagatcgtcaacaaaaacaatgtgagatgtctccagcatttttacggacccaatcatgagcactgctttaataggacacttctgagaaattcatcaggctgtgaagcgcgccgtgatgaatatcgaacagagtttaccacagctttgcagcgcgttgacttattcatgggtcaattcagcgaagtcctcttaacatctatatccaccttcattaaaggagacctcaccatagctaatcttgggacatcagagggtcgcttcatgcaggttgtggtttctcgatcaggaccatcaacccctcatgtgaattttctcctggactcccatccagtgtctccagaagtgattgtggagcatacattaaaccaaaatggctacacactggttatcactgggaagaagatcacgaagatcccattgaatggcttgggctgcagacatttccagtcctgcagtcaatgcctctctgccccaccctttgttcagtgtggctggtgccacgacaaatgtgtgcgatcggaggaatgcctgagcgggacatggactcaacagatctgtctgcctgcaatctacaaggttttcccaaatagtgcaccccttgaaggagggacaaggctgaccatatgtggctgggactttggatttcggaggaataataaatttgatttaaagaaaactagagttctccttggaaatgagagctgcaccttgactttaagtgagagcacgatgaatacattgaaatgcacagttggtcctgccatgaataagcatttcaatatgtccataattatttcaaatggccacgggacaacacaatacagtacattctcctatgtggatcctgtaataacaagtatttcgccgaaatacggtcctatggctggtggcactttacttactttaactggaaattacctaaacagtgggaattctagacacatttcaattggtggaaaaacatgtactttaaaaagtgtgtcaaacagtattcttgaatgttataccccagcccaaaccatttcaactgagtttgctgttaaattgaaaattgacttagccaaccgagagacaagcatcttcagttaccgtgaagatcccattgtctatgaaattcatccaaccaaatcttttattagtacttggtggaaagaacctctcaacattgtcagttttctattttgctttgccagtggtgggagcacaataacaggtgttgggaaaaacctgaattcagttagtgtcccgagaatggtcataaatgtgcatgaagcaggaaggaactttacagtggcatgtcaacatcgctctaattcagagataatctgttgtaccactccttccctgcaacagctgaatctgcaactccccctgaaaaccaaagcctttttcatgttagatgggatcctttccaaatactttgatctcatttatgtacataatcctgtgtttaagccttttgaaaagccagtgatgatctcaatgggcaatgaaaatgtactggaaattaagggaaatgatattgaccctgaagcagttaaaggtgaagtgttaaaagttggaaataagagctgtgagaatatacacttacattctgaagccgttttatgcacggtccccaatgacctgctgaaattgaacagcgagctaaatatagagtggaagcaagcaatttcttcaaccgtccttggaaaagtaatagttcaaccagatcagaatttcacaggattgattgctggtgttgtctcaatatcaacagcactgttattactacttgggtttttcctgtggctgaaaaagagaaagcaaattaaagatctgggcagtgaattagtttgctacgatgcaagagtacacactcctcatttggataggcttgtaagtgcccgaagtgtaagcccaactacagaaatggtttcaaatgaatctgtagactaccgagctacttttccagaagatcagtttcctaattcatctcagaacggttcatgccgacaagtgcagtatcctctgacagacatgtcccccatcctaactagtggggactctgatatatccagtccattactgcaaaatactgtccacattgacctcagtgctctaaatccagagctggtccaggcagtgcagcatgtagtgattgggcccagtagcctgattgtgcatttcaatgaagtcataggaagagggcattttggttgtgtatatcatgggactttgttggacaatgatggcaagaaaattcactgtgctgtgaaatccttgaacagaatcactgacataggagaagtttcccaatttctgaccgagggaatcatcatgaaagattttagtcatcccaatgtcctctcgctcctgggaatctgcctgcgaagtgaagggtctccgctggtggtcctaccatacatgaaacatggagatcttcgaaatttcattcgaaatgagactcataatccaactgtaaaagatcttattggctttggtcttcaagtagccaaagcgatgaaatatcttgcaagcaaaaagtttgtccacagagacttggctgcaagaaactgtatgctggatgaaaaattcacagtcaaggttgctgattttggtcttgccagagacatgtatgataaagaatactatagtgtacacaacaaaacaggtgcaaagctgccagtgaagtggatggctttggaaagtctgcaaactcaaaagtttaccaccaagtcagatgtgtggtcctttggcgtcgtcctctgggagctgatgacaagaggagccccaccttatcctgacgtaaacacctttgatataactgtttacttgttgcaagggagaagactcctacaacccgaatactgcccagaccccttatatgaagtaatgctaaaatgctggcaccctaaagccgaaatgcgcccatccttttctgaactggtgtcccggatatcagcgatcttctctactttcattggggagcactatgtccatgtgaacgctacttatgtgaacgtaaaatgtgtcgctccgtatccttctctgttgtcatcagaagataacgctgatgatgaggtggacacacgaccagcctccttctgggagacatcatag

SEQ ID NO: 730 - DNA, 4227 bp, Homo sapiens
atgaaggcccccgctgtgcttgcacctggcatcctcgtgctcctgtttaccttggtgcagaggagcaatggggagtgtaaagaggcactagcaaagtccgagatgaatgtgaatatgaagtatcagcttcccaacttcaccgcggaaacacccatccagaatgtcattctacatgagcatcacattttccttggtgccactaactacatttatgttttaaatgaggaagaccttcagaaggttgctgagtacaagactgggcctgtgctggaacacccagattgtttcccatgtcaggactgcagcagcaaagccaatttatcaggaggtgtttggaaagataacatcaacatggctctagttgtcgacacctactatgatgatcaactcattagctgtggcagcgtcaacagagggacctgccagcgacatgtctttccccacaatcatactgctgacatacagtcggaggttcactgcatattctccccacagatagaagagcccagccagtgtcctgactgtgtggtgagcgccctgggagccaaagtcctttcatctgtaaaggaccggttcatcaacttctttgtaggcaataccataaattcttcttatttcccagatcatccattgcattcgatatcagtgagaaggctaaaggaaacgaaagatggttttatgtttttgacggaccagtcctacattgatgttttacctgagttcagagattcttaccccattaagtatgtccatgcctttgaaagcaacaattttatttacttcttgacggtccaaagggaaactctagatgctcagacttttcacacaagaataatcaggttctgttccataaactctggattgcattcctacatggaaatgcctctggagtgtattctcacagaaaagagaaaaaagagatccacaaagaaggaagtgtttaatatacttcaggctgcgtatgtcagcaagcctggggcccagcttgctagacaaataggagccagcctgaatgatgacattcttttcggggtgttcgcacaaagcaagccagattctgccgaaccaatggatcgatctgccatgtgtgcattccctatcaaatatgtcaacgacttcttcaacaagatcgtcaacaaaaacaatgtgagatgtctccagcatttttacggacccaatcatgagcactgctttaataggacacttctgagaaattcatcaggctgtgaagcgcgccgtgatgaatatcgaacagagtttaccacagctttgcagcgcgttgacttattcatgggtcaattcagcgaagtcctcttaacatctatatccaccttcattaaaggagacctcaccatagctaatcttgggacatcagagggtcgcttcatgcaggttgtggtttctcgatcaggaccatcaacccctcatgtgaattttctcctggactcccatccagtgtctccagaagtgattgtggagcatacattaaaccaaaatggctacacactggttatcactgggaagaagatcacgaagatcccattgaatggcttgggctgcagacatttccagtcctgcagtcaatgcctctctgccccaccctttgttcagtgtggctggtgccacgacaaatgtgtgcgatcggaggaatgcctgagcgggacatggactcaacagatctgtctgcctgcaatctacaaggttttcccaaatagtgcaccccttgaaggagggacaaggctgaccatatgtggctgggactttggatttcggaggaataataaatttgatttaaagaaaactagagttctccttggaaatgagagctgcaccttgactttaagtgagagcacgatgaatacattgaaatgcacagttggtcctgccatgaataagcatttcaatatgtccataattatttcaaatggccacgggacaacacaatacagtacattctcctatgtggatcctgtaataacaagtatttcgccgaaatacggtcctatggctggtggcactttacttactttaactggaaattacctaaacagtgggaattctagacacatttcaattggtggaaaaacatgtactttaaaaagtgtgtcaaacagtattcttgaatgttataccccagcccaaaccatttcaactgagtttgctgttaaattgaaaattgacttagccaaccgagagacaagcatcttcagttaccgtgaagatcccattgtctatgaaattcatccaaccaaatcttttattagtacttggtggaaagaacctctcaacattgtcagttttctattttgctttgccagtggtgggagcacaataacaggtgttgggaaaaacctgaattcagttagtgtcccgagaatggtcataaatgtgcatgaagcaggaaggaactttacagtggcatgtcaacatcgctctaattcagagataatctgttgtaccactccttccctgcaacagctgaatctgcaactccccctgaaaaccaaagcctttttcatgttagatgggatcctttccaaatactttgatctcatttatgtacataatcctgtgtttaagccttttgaaaagccagtgatgatctcaatgggcaatgaaaatgtactggaaattaagggaaatgatattgaccctgaagcagttaaaggtgaagtgttaaaagttggaaataagagctgtgagaatatacacttacattctgaagccgttttatgcacggtccccaatgacctgctgaaattgaacagcgagctaaatatagagtggaagcaagcaatttcttcaaccgtccttggaaaagtaatagttcaaccagatcagaatttcacaggattgattgctggtgttgtctcaatatcaacagcactgttattactacttgggtttttcctgtggctgaaaaagagaaagcaaattaaagatctgggcagtgaattagttcgctacgatgcaagagtacacactcctcatttggataggcttgtaagtgcccgaagtgtaagcccaattacagaaatggtttcaaatgaatctgtagactaccgagctacttttccagaagatcagtttcctaattcatctcagaacggttcatgccgacaagtgcagtatcctctgacagacatgtcccccatcctaactagtggggactctgatatatccagtccattactgcaaaatactgtccacattgacctcagtgctctaaatccagagctggtccaggcagtgcagcatgtagtgattgggcccagtagcctgattgtgcatttcaatgaagtcataggaagagggcattttggttgtgtatatcatgggactttgttggacaatgatggcaagaaaattcactgtgctgtgaaatccttgaacagaatcactgacataggagaagtttcccaatttctgaccgagggaatcatcatgaaagattttagtcatcccaatgtcctctcgctcctgggaatctgcctgcgaagtgaagggtctccgctggtggtcctaccatacatgaaacatggagatcttcgaaatttcattcgaaatgagactcataatccaactgtaaaagatcttattggctttggtcttcaagtagccaaagcgatgaaatatcttgcaagcaaaaagtttgtccacagagacttggctgcaagaaactgtatgctggatgaaaaattcacagtcaaggttgctgattttggtcttgccagagacatgtatgataaagaatactatagtgtacacaacaaaacaggtgcaaagctgccagtgaagtggatggctttggaaagtctgcaaactcaaaagtttaccaccaagtcagatgtgtggtcctttggcgtcgtcctctgggagctgatgacaagaggagccccaccttatcctgacgtaaacacctttgatataactgtttacttgttgcaagggagaagactcctacaacccgaatactgcccagaccccttatatgaagtaatgctaaaatgctggcaccctaaagccgaaatgcgcccatccttttctgaactggtgtcccggatatcagcgatcttctctactttcattggggagcactatgtccatgtgaacgctacttatgtgaacgtaaaatgtgtcgctccgtatccttctctgttgtcatcagaagataacgctgatgatgaggtggacacacgaccagcctccttctgggagacatcatag

SEQ ID NO: 731 - DNA, 4227 bp, Homo sapiens
atgaaggcccccgctgtgcttgcacctggcatcctcgtgctcctgtttaccttggtgcagaggagcaatggggagtgtaaagaggcactagcaaagtccgagatgaatgtgaatatgaagtatcagcttcccaacttcaccgcggaaacacccatccagaatgtcattctacatgagcatcacattttccttggtgccactaactacatttatgttttaaatgaggaagaccttcagaaggttgctgagtacaagactgggcctgtgctggaacacccagattgtttcccatgtcaggactgcagcagcaaagccaatttatcaggaggtgtttggaaagataacatcaacatggctctagttgtcgacacctactatgatgatcaactcattagctgtggcagcgtcaacagagggacctgccagcgacatgtctttccccacaatcatactgctgacatacagtcggaggttcactgcatattctccccacagatagaagagcccagccagtgtcctgactgtgtggtgagcgccctgggagccaaagtcctttcatctgtaaaggaccggttcatcaacttctttgtaggcaataccataaattcttcttatttcccagatcatccattgcattcgatatcagtgagaaggctaaaggaaacgaaagatggttttatgtttttgacggaccagtcctacattgatgttttacctgagttcagagattcttaccccattaagtatgtccatgcctttgaaagcaacaattttatttacttcttgacggtccaaagggaaactctagatgctcagacttttcacacaagaataatcaggttctgttccataaactctggattgcattcctacatggaaatgcctctggagtgtattctcacagaaaagagaaaaaagagatccacaaagaaggaagtgtttaatatacttcaggctgcgtatgtcagcaagcctggggcccagcttgctagacaaataggagccagcctgaatgatgacattcttttcggggtgttcgcacaaagcaagccagattctgccgaaccaatggatcgatctgccatgtgtgcattccctatcaaatatgtcaacgacttcttcaacaagatcgtcaacaaaaacaatgtgagatgtctccagcatttttacggacccaatcatgagcactgctttaataggacacttctgagaaattcatcaggctgtgaagcgcgccgtgatgaatatcgaacagagtttaccacagctttgcagcgcgttgacttattcatgggtcaattcagcgaagtcctcttaacatctatatccaccttcattaaaggagacctcaccatagctaatcttgggacatcagagggtcgcttcatgcaggttgtggtttctcgatcaggaccatcaacccctcatgtgaattttctcctggactcccatccagtgtctccagaagtgattgtggagcatacattaaaccaaaatggctacacactggttatcactgggaagaagatcacgaagatcccattgaatggcttgggctgcagacatttccagtcctgcagtcaatgcctctctgccccaccctttgttcagtgtggctggtgccacgacaaatgtgtgcgatcggaggaatgcctgagcgggacatggactcaacagatctgtctgcctgcaatctacaaggttttcccaaatagtgcaccccttgaaggagggacaaggctgaccatatgtggctgggactttggatttcggaggaataataaatttgatttaaagaaaactagagttctccttggaaatgagagctgcaccttgactttaagtgagagcacgatgaatacattgaaatgcacagttggtcctgccatgaataagcatttcaatatgtccataattatttcaaatggccacgggacaacacaatacagtacattctcctatgtggatcctgtaataacaagtatttcgccgaaatacggtcctatggctggtggcactttacttactttaactggaaattacctaaacagtgggaattctagacacatttcaattggtggaaaaacatgtactttaaaaagtgtgtcaaacagtattcttgaatgttataccccagcccaaaccatttcaactgagtttgctgttaaattgaaaattgacttagccaaccgagagacaagcatcttcagttaccgtgaagatcccattgtctatgaaattcatccaaccaaatcttttattagtacttggtggaaagaacctctcaacattgtcagttttctattttgctttgccagtggtgggagcacaataacaggtgttgggaaaaacctgaattcagttagtgtcccgagaatggtcataaatgtgcatgaagcaggaaggaactttacagtggcatgtcaacatcgctctaattcagagataatctgttgtaccactccttccctgcaacagctgaatctgcaactccccctgaaaaccaaagcctttttcatgttagatgggatcctttccaaatactttgatctcatttatgtacataatcctgtgtttaagccttttgaaaagccagtgatgatctcaatgggcaatgaaaatgtactggaaattaagggaaatgatattgaccctgaagcagttaaaggtgaagtgttaaaagttggaaataagagctgtgagaatatacacttacattctgaagccgttttatgcacggtccccaatgacctgctgaaattgaacagcgagctaaatatagagtggaagcaagcaatttcttcaaccgtccttggaaaagtaatagttcaaccagatcagaatttcacaggattgattgctggtgttgtctcaatatcaacagcactgttattactacttgggtttttcctgtggctgaaaaagagaaagcaaattaaagatctgggcagtgaattagttcgctacgatgcaagagtacacactcctcatttggataggcttgtaagtgcccgaagtgtaagcccaactacagaaatggtttcaaatgaatctgtagactaccgagctacttttccagaagatcagtttcctaattcatctcagaacggttcatgccgacaagtgcagtatcctctgacagacatgtcccccatcctaactagtggggactctgatatatccagtccattactgcaaaatactgtccacattgacctcagtgctctaaatccagagctggtccaggcagtgcagcatgtagtgattgggcccagtagcctgattgtgcatttcaatgaagtcataggaagagggcattttggttgtgtatatcatgggactttgttggacaatgatggcaagaaaattcactgtgctgtgaaatccttgaacagaatcactgacataggagaagtttcccaatttctgaccgagggaatcatcatgaaagattttagtcatcccaatgtcctctcgctcctgggaatctgcctgcgaagtgaagggtctccgctggtggtcctaccatacatgaaacatggagatcttcgaaatttcattcgaaatgagactcataatccaactgtaaaagatcttattggctttggtcttcaagtagccaaagcgatgaaatatcttgcaagcaaaaagtttgtccacagagacttggctgcaagaaactgtatgctggatgaaaaattcacagtcaagattgctgattttggtcttgccagagacatgtatgataaagaatactatagtgtacacaacaaaacaggtgcaaagctgccagtgaagtggatggctttggaaagtctgcaaactcaaaagtttaccaccaagtcagatgtgtggtcctttggcgtcgtcctctgggagctgatgacaagaggagccccaccttatcctgacgtaaacacctttgatataactgtttacttgttgcaagggagaagactcctacaacccgaatactgcccagaccccttatatgaagtaatgctaaaatgctggcaccctaaagccgaaatgcgcccatccttttctgaactggtgtcccggatatcagcgatcttctctactttcattggggagcactatgtccatgtgaacgctacttatgtgaacgtaaaatgtgtcgctccgtatccttctctgttgtcatcagaagataacgctgatgatgaggtggacacacgaccagcctccttctgggagacatcatag

SEQ ID NO: 732 - DNA, 2391 bp, Homo sapiens
atgctgcgaggcggacggcgcgggcagcttggctggcacagctgggctgcggggccgggcagcctgctggcttggctgatactggcatctgcgggcgccgcaccctgccccgatgcctgctgcccccacggctcctcgggactgcgatgcacccgggatggggccctggatagcctccaccacctgcccggcgcagagaacctgactgagctctacatcgagaaccagcagcatctgcagcatctggagctccgtgatctgaggggcctgggggagctgagaaacctcaccatcgtgaagagtggtctccgtttcgtggcgccagatgccttccatttcactcctcggctcagtcgcctgaatctctccttcaacgctctggagtctctctcctggaaaactgtgcagggcctctccttacaggaactggtcctgtcggggaaccctctgcactgttcttgtgccctgcgctggctacagcgctgggaggaggagggactgggcggagtgcctgaacagaagctgcagtgtcatgggcaagggcccctggcccacatgcccaatgccagctgtggtgtgcccacgctgaaggtccaggtgcccaatgcctcggtggatgtgggggacgacgtgctgctgcggtgccaggtggaggggcggggcctggagcaggccggctggatcctcacagagctggagcagtcagccacggtgatgaaatctgggggtctgccatccctggggctgaccctggccaatgtcaccagtgacctcaacaggaagaacgtgacgtgctgggcagagaacgatgtgggccgggcagaggtctctgttcaggtcaacgtctccttcccggccagtgtgcagctgcacacggcggtggagatgcaccactggtgcatccccttctctgtggatgggcagccggcaccgtctctgcgctggctcttcaatggctccgtgctcaatgagaccagcttcatcttcactgagttcctggagccggcagccaatgagaccgtgcggcacgggtgtctgcgcctcaaccagcccacccacgtcaacaacggcaactacacgctgctggctgccaaccccttcggccaggcctccgcctccatcatggctgccttcatggacaaccctttcgagttcaaccccgaggaccccatccctgtctccttctcgccggtggacactaacagcacatctggagacccggtggagaagaaggacgaaacaccttttggggtctcggtggctgtgggcctggccgtctttgcctgcctcttcctttctacgctgctccttgtgctcaacaaatgtggacggagaaacaagtttgggatcaaccgcccggctgtgctggctccagaggatgggctggccatgtccctgcatttcatgacattgggtggcagctccctgtcccccaccgagggcaaaggctctgggctccaaggccacatcatcgagaacccacaatacttcagtgatgcctgtgttcaccacatcaagcgccgggacatcgtgctcaagtgggagctgggggagggcgcctttgggaaggtcttccttgctgagtgccacaacctcctgcctgagcaggacaagatgctggtggctgtcaaggcactgaaggaggcgtccgagagtgctcggcaggacttccaacgtgaggctgagctgctcaccatgctgcagcaccagcacatcgtgcgcttcttcggcgtctgcaccgagggccgccccctgctcatggtcttcgagtatatgcggcacggggacctcaaccgcttcctccgatcctatggacccgatgccaagctgctggctggtggggaggatgtggctccaggccccctgggtctggggcagctgctggccgtggctagccaggtcgctgcggggatggtgtacctggcgggtctgcattttgtgcaccgggacctggccacacgcaactgtctagtgggccagggactggtggtcaagattggtgattttggcatgagcagggatatctacagcaccgactattaccgtgtgggaggccgcaccatgctgcccattcgctggatgccgcccgagagcatcctgtaccgtaagttcaccaccgagagcgacgtgtggagcttcggcgtggtgctctgggagatcttcacctacggcaagcagccctggtaccagctctccaacacggaggcaatcgactgcatcacgcagggacgtgagttggagcggccacgtgcctgcccaccagaggtctacgccatcatgcggggctgctggcagcgggagccccagcaacgccacagcatcaaggatgtgcacgcccggctgcaagccctggcccaggcacctcctgtctacctggatgtcctgggctag

SEQ ID NO: 733 - DNA, 2391 bp, Homo sapiens
atgctgcgaggcggacggcgcgggcagcttggctggcacagctgggctgcggggccgggcagcctgctggcttggctgatactggcatctgcgggcgccgcaccctgccccgatgcctgctgcccccacggctcctcgggactgcgatgcacccgggatggggccctggatagcctccaccacctgcccggcgcagagaacctgactgagctctacatcgagaaccagcagcatctgcagcatctggagctccgtgatctgaggggcctgggggagctgagaaacctcaccatcgtgaagagtggtctccgtttcgtggcgccagatgccttccatttcactcctcggctcagtcgcctgaatctctccttcaacgctctggagtctctctcctggaaaactgtgcagggcctctccttacaggaactggtcctgtcggggaaccctctgcactgttcttgtgccctgcgctggctacagcgctgggaggaggagggactgggcggagtgcctgaacagaagctgcagtgtcatgggcaagggcccctggcccacatgcccaatgccagctgtggtgtgcccacgctgaaggtccaggtgcccaatgcctcggtggatgtgggggacgacgtgctgctgcggtgccaggtggaggggcggggcctggagcaggccggctggatcctcacagagctggagcagtcagccacggtgatgaaatctgggggtctgccatccctggggctgaccctggccaatgtcaccagtgacctcaacaggaagaacgtgacgtgctgggcagagaacgatgtgggccgggcagaggtctctgttcaggtcaacgtctccttcccggccagtgtgcagctgcacacggcggtggagatgcaccactggtgcatccccttctctgtggatgggcagccggcaccgtctctgcgctggctcttcaatggctccgtgctcaatgagaccagcttcatcttcactgagttcctggagccggcagccaatgagaccgtgcggcacgggtgtctgcgcctcaaccagcccacccacgtcaacaacggcaactacacgctgctggctgccaaccccttcggccaggcctccgcctccatcatggctgccttcatggacaaccctttcgagttcaaccccgaggaccccatccctgtctccttctcgccggtggacactaacagcacatctggagacccggtggagaagaaggacgaaacaccttttggggtctcggtggctgtgggcctggccgtctttgcctgcctcttcctttctacgctgctccttgtgctcaacaaatgtggacggagaaacaagtttgggatcaaccgcccggctgtgctggctccagaggatgggctggccatgtccctgcatttcatgacattgggtggcagctccctgtcccccaccgagggcaaaggctctgggctccaaggccacatcatcgagaacccacaatacttcagtgatgcctgtgttcaccacatcaagcgccgggacatcgtgctcaagtgggagctgggggagggcgcctttgggaaggtcttccttgctgagtgccacaacctcctgcctgagcaggacaagatgctggtggctgtcaaggcactgaaggaggcgtccgagagtgctcggcaggacttccaacgtgaggctgagctgctcaccatgctgcagcaccagcacatcgtgcgcttcttcggcgtctgcaccgagggccgccccctgctcatggtcttcgagtatatgcggcacggggacctcaaccgcttcctccgatcccatggacccgatgccaagctgctggctgttggggaggatgtggctccaggccccctgggtctggggcagctgctggccgtggctagccaggtcgctgcggggatggtgtacctggcgggtctgcattttgtgcaccgggacctggccacacgcaactgtctagtgggccagggactggtggtcaagattggtgattttggcatgagcagggatatctacagcaccgactattaccgtgtgggaggccgcaccatgctgcccattcgctggatgccgcccgagagcatcctgtaccgtaagttcaccaccgagagcgacgtgtggagcttcggcgtggtgctctgggagatcttcacctacggcaagcagccctggtaccagctctccaacacggaggcaatcgactgcatcacgcagggacgtgagttggagcggccacgtgcctgcccaccagaggtctacgccatcatgcggggctgctggcagcgggagccccagcaacgccacagcatcaaggatgtgcacgcccggctgcaagccctggcccaggcacctcctgtctacctggatgtcctgggctag

SEQ ID NO: 734 - DNA, 2391 bp, Homo sapiens
atgctgcgaggcggacggcgcgggcagcttggctggcacagctgggctgcggggccgggcagcctgctggcttggctgatactggcatctgcgggcgccgcaccctgccccgatgcctgctgcccccacggctcctcgggactgcgatgcacccgggatggggccctggatagcctccaccacctgcccggcgcagagaacctgactgagctctacatcgagaaccagcagcatctgcagcatctggagctccgtgatctgaggggcctgggggagctgagaaacctcaccatcgtgaagagtggtctccgtttcgtggcgccagatgccttccatttcactcctcggctcagtcgcctgaatctctccttcaacgctctggagtctctctcctggaaaactgtgcagggcctctccttacaggaactggtcctgtcggggaaccctctgcactgttcttgtgccctgcgctggctacagcgctgggaggaggagggactgggcggagtgcctgaacagaagctgcagtgtcatgggcaagggcccctggcccacatgcccaatgccagctgtggtgtgcccacgctgaaggtccaggtgcccaatgcctcggtggatgtgggggacgacgtgctgctgcggtgccaggtggaggggcggggcctggagcaggccggctggatcctcacagagctggagcagtcagccacggtgatgaaatctgggggtctgccatccctggggctgaccctggccaatgtcaccagtgacctcaacaggaagaacgtgacgtgctgggcagagaacgatgtgggccgggcagaggtctctgttcaggtcaacgtctccttcccggccagtgtgcagctgcacacggcggtggagatgcaccactggtgcatccccttctctgtggatgggcagccggcaccgtctctgcgctggctcttcaatggctccgtgctcaatgagaccagcttcatcttcactgagttcctggagccggcagccaatgagaccgtgcggcacgggtgtctgcgcctcaaccagcccacccacgtcaacaacggcaactacacgctgctggctgccaaccccttcggccaggcctccgcctccatcatggctgccttcatggacaaccctttcgagttcaaccccgaggaccccatccctgtctccttctcgccggtggacactaacagcacatctggagacccggtggagaagaaggacgaaacaccttttggggtctcggtggctgtgggcctggccgtctttgcctgcctcttcctttctacgctgctccttgtgctcaacaaatgtggacggagaaacaagtttgggatcaaccgcccggctgtgctggctccagaggatgggctggccatgtccctgcatttcatgacattgggtggcagctccctgtcccccaccgagggcaaaggctctgggctccaaggccacatcatcgagaacccacaatacttcagtgatgcctgtgttcaccacatcaagcgccgggacatcgtgctcaagtgggagctgggggagggcgcctttgggaaggtcttccttgctgagtgccacaacctcctgcctgagcaggacaagatgctggtggctgtcaaggcactgaaggaggcgtccgagagtgctcggcaggacttccaacgtgaggctgagctgctcaccatgctgcagcaccagcacatcgtgcgcttcttcggcgtctgcaccgagggccgccccctgctcatggtcttcgagtatatgcggcacggggacctcaaccgcttcctccgatcccatggacccgatgccaagctgctggctggtggggaggatgtggctccaggccccctgggtctggggcagctgctggccgtggctagccaggtcgctgcggggatggtgtacctggcgggtctgcattttgtgcaccgggacctggccacacgcaactgtctagtgggccagggactggtggtcaagattggtgattttggcatgagcagggatatctacagcaccgactattaccgtgtgggaggccgcaccatgctgcccattcgctggatgccgcccgagagcatcctgtaccgtaagttcaccaccgagagcgacgtgtggagcttcggcgtggtgctctgggagatcttcacctacggcaagcagccctggtaccagctctccaacacggaggcaatcgactgcatcacgcagggacgtgagttggagcggccacgtgcctgcccaccagaggtctacgccatcatgcggggctgctggcagcgggagccccagcaacgccacagcatcaaggatgtgcacgcccagctgcaagccctggcccaggcacctcctgtctacctggatgtcctgggctag

SEQ ID NO: 735 - DNA, 2454 bp, Homo sapiens
atggatgtctctctttgcccagccaagtgtagtttctggcggattttcttgctgggaagcgtctggctggactatgtgggctccgtgctggcttgccctgcaaattgtgtctgcagcaagactgagatcaattgccggcggccggacgatgggaacctcttccccctcctggaagggcaggattcagggaacagcaatgggaacgccagtatcaacatcacggacatctcaaggaatatcacttccatacacatagagaactggcgcagtcttcacacgctcaacgccgtggacatggagctctacaccggacttcaaaagctgaccatcaagaactcaggacttcggagcattcagcccagagcctttgccaagaacccccatttgcgttatataaacctgtcaagtaaccggctcaccacactctcgtggcagctcttccagacgctgagtcttcgggaattgcagttggagcagaactttttcaactgcagctgtgacatccgctggatgcagctctggcaggagcagggggaggccaagctcaacagccagaacctctactgcatcaacgctgatggctcccagcttcctctcttccgcatgaacatcagtcagtgtgaccttcctgagatcagcgtgagccacgtcaacctgaccgtacgagagggtgacaatgctgttatcacttgcaatggctctggatcaccccttcctgatgtggactggatagtcactgggctgcagtccatcaacactcaccagaccaatctgaactggaccaatgttcatgccatcaacttgacgctggtgaatgtgacgagtgaggacaatggcttcaccctgacgtgcattgcagagaacgtggtgggcatgagcaatgccagtgttgccctcactgtctactatcccccacgtgtggtgagcctggaggagcctgagctgcgcctggagcactgcatcgagtttgtggtgcgtggcaaccccccaccaacgctgcactggctgcacaatgggcagcctctgcgggagtccaagatcatccatgtggaatactaccaagagggagagatttccgagggctgcctgctcttcaacaagcccacccactacaacaatggcaactataccctcattgccaaaaacccactgggcacagccaaccagaccatcaatggccacttcctcaaggagccctttccagagagcacggataactttatcttgtttgacgaagtgagtcccacacctcctatcactgtgacccacaaaccagaagaagacacttttggggtatccatagcagttggacttgctgcttttgcctgtgtcctgttggtggttctcttcgtcatgatctttggaatgaagggtcccgtggctgtcatcagtggtgaggaggactcagccagcccactgcaccacatcaaccacggcatcaccacgccctcgtcactggatgcggggcccgacactgtggtcattggcatgactcgcatccctgtcattgagaacccccagtacttccgtcagggacacaactgccacaagccggacacgtatgtgcagcacattaagaggagagacatcgtgctgaagcgagaactgggtgagggagcctttggaaaggtcttcctggccgagtgctacaacctcagcccgaccaaggacaagatgcttgtggctgtgaaggccctgaaggatcccaccctggctgcccggaaggatttccagagggaggccgagctgctcaccaacctgcagcatgagcacattgtcaagttctatggagtgtgcggcgatggggaccccctcatcatggtctttgaatacatgaagcatggagacctgaataagttcctcagggcccatgggccaaatgcaatgatccttgtggatggacagccacgccaggccaagggtgagctggggctctcccaaatgctccacattgccagtcagatcgcctcgggtatggtgtacctggcctcccagcactttgtgcaccgagacctggccaccaggaactgcctggttggagcgaatctgctagtgaagattggggacttcggcatgtccagagatgtctacagcacggattattacagggtgggaggacacaccatgctccccattcgctggatgcctcctgaaagcatcatgtaccggaagttcactacagagagtgatgtatggagcttcggggtgatcctctgggagatcttcacctatggaaagcagccatggttccaactctcaaacacggaggtcattgagtgcattacccaaggtcgtgttttggagcggccccgagtctgccccaaagaggtgtacgatgtcatgctggggtgctggcagagggaaccacagcagcggttgaacatcaaggagatctacaaaatcctccatgctttggggaaggccaccccaatctacctggacattcttggctag

SEQ ID NO: 736 - DNA, 2289 bp, Homo sapiens
atggatgtctctctttgcccagccaagtgtagtttctggcggattttcttgctgggaagcgtctggctggactatgtgggctccgtgctggcttgccctgcaaattgtgtctgcagcaagactgagatcaattgccggcggccggacgatgggaacctcttccccctcctggaagggcaggattcagggaacagcaatgggaacgccagtatcaacatcacggacatctcaaggaatatcacttccatacacatagagaactggcgcagtcttcacacgctcaacgccgtggacatggagctctacaccggacttcaaaagctgaccatcaagaactcaggacttcggagcattcagcccagagcctttgccaagaacccccatttgcgttatataaacctgtcaagtaaccggctcaccacactctcgtggcagctcttccagacgctgagtcttcgggaattgcagttggagcagaactttttcaactgcagctgtgacatccgctggatgcagctctggcaggagcagggggaggccaagctcaacagccagaacctctactgcatcaacgctgatggctcccagcttcctctcttccgcatgaacatcagtcagtgtgaccttcctgagatcagcgtgagccacgtcaacctgaccgtacgagagggtgacaatgctgttatcacttgcaatggctctggatcaccccttcctgatgtggactggatagtcactgggctgcagtccatcaacactcaccagaccaatctgaactggaccaatgttcatgccatcaacttgacgctggtgaatgtgacgagtgaggacaatggcttcaccctgacgtgcattgcagagaacgtggtgggcatgagcaatgccagtgttgccctcactgtctactatcccccacgtgtggtgagcctggaggagcctgagctgcgcctggagcactgcatcgagtttgtggtgcgtggcaaccccccaccaacgctgcactggctgcacaatgggcagcctctgcgggagtccaagatcatccatgtggaatactaccaagagggagagatttccgagggctgcctgctcttcaacaagcccacccactacaacaatggcaactataccctcattgccaaaaacccactgggcacagccaaccagaccatcaatggccacttcctcaaggagccctttccagagagcacggataactttatcttgtttgacgaagtgagtcccacacctcctatcactgtgacccacaaaccagaagaagacacttttggggtatccatagcagttggacttgctgcttttgcctgtgtcctgttggtggttctcttcgtcatgatcaacaaatatggtcgacggtccaaatttggaatgaaggatgtgcagcacattaagaggagagacatcgtgctgaagcgagaactgggtgagggagcctttggaaaggtcttcctggccgagtgctacaacctcagcccgaccaaggacaagatgcttgtggctgtgaaggccctgaaggatcccaccctggctgcccggaaggatttccagagggaggccgagctgctcaccaacctgcagcatgagcacattgtcaagttctatggagtgtgcggcgatggggaccccctcatcatggtctttgaatacatgaagcatggagacctgaataagttcctcagggcccatgggccagatgcaatgatccttgtggatggacagccacgccaggccaagggtgagctggggctctcccaaatgctccacattgccagtcagatcgcctcgggtatggtgtacctggcctcccagcactttgtgcaccgagacctggccaccaggaactgcctggttggagcgaatctgctagtgaagattggggacttcggcatgtccagagatgtctacagcacggattattacagggtgggaggacacaccatgctccccattcgctggatgcctcctgaaagcatcatgtaccggaagttcactacagagagtgatgtatggagcttcggggtgatcctctgggagatcttcacctatggaaagcagccatggttccaactctcaaacacggaggtcattgagtgcattacccaaggtcgtgttttggagcggccccgagtctgccccaaagaggtgtacgatgtcatgctggggtgctggcagagggaaccacagcagcggttgaacatcaaggagatctacaaaatcctccatgctttggggaaggccaccccaatctacctggacattcttggctag

SEQ ID NO: 737 - DNA, 2520 bp, Homo sapiens
atggatgtctctctttgcccagccaagtgtagtttctggcggattttcttgctgggaagcgtctggctggactatgtgggctccgtgctggcttgccctgcaaattgtgtctgcagcaagactgagatcaattgccggcggccggacgatgggaacctcttccccctcctggaagggcaggattcagggaacagcaatgggaacgccagtatcaacatcacggacatctcaaggaatatcacttccatacacatagagaactggcgcagtcttcacacgctcaacgccgtggacatggagctctacaccggacttcaaaagctgaccatcaagaactcaggacttcggagcattcagcccagagcctttgccaagaacccccatttgcgttatataaacctgtcaagtaaccggctcaccacactctcgtggcagctcttccagacgctgagtcttcgggaattgcagttggagcagaactttttcaactgcagctgtgacatccgctggatgcagctctggcaggagcagggggaggccaagctcaacagccagaacctctactgcatcaacgctgatggctcccagcttcctctcttccgcatgaacatcagtcagtgtgaccttcctgagatcagcgtgagccacgtcaacctgaccgtacgagagggtgacaatgctgttatcacttgcaatggctctggatcaccccttcctgatgtggactggatagtcactgggctgcagtccatcaacactcaccagaccaatctgaactggaccaatgttcatgccatcaacttgacgctggtgaatgtgacgagtgaggacaatggcttcaccctgacgtgcattgcagagaacgtggtgggcatgagcaatgccagtgttgccctcactgtctactatcccccacgtgtggtgagcctggaggagcctgagctgcgcctggagcactgcatcgagtttgtggtgcgtggcaaccccccaccaacgctgcactggctgcacaatgggcagcctctgcgggagtccaagatcatccatgtggaatactaccaagagggagagatttccgagggctgcctgctcttcaacaagcccacccactacaacaatggcaactataccctcattgccaaaaacccactgggcacagccaaccagaccatcaatggccacttcctcaaggagccctttccagagagcacggataactttatcttgtttgacgaagtgagtcccacacctcctatcactgtgacccacaaaccagaagaagacacttttggggtatccatagcagttggacttgctgcttttgcctgtgtcctgttggtggttctcttcgtcatgatcaacaaatatggtcgacggtccaaatttggaatgaagggtcccgtggctgtcatcagtggtgaggaggactcagccagcccactgcaccacatcaaccacggcatcaccacgccctcgtcactggatgccgggcccgacactgtggtcattggcatgactcgcatccctgtcattgagaacccccagtacttccgtcagggacacaactgccacaagccggacacgtatgtgcagcacattaagaggagagacatcgtgctgaagcgagaactgggtgagggagcctttggaaaggtcttcctggccgagtgctacaacctcagcccgaccaaggacaagatgcttgtggctgtgaaggccctgaaggatcccaccctggctgcccggaaggatttccagagggaggccgagctgctcaccaacctgcagcatgagcacattgtcaagttctatggagtgtgcggcgatggggaccccctcatcatggtctttgaatacatgaagcatggagacctgaataagttcctcagggcccatgggccagatgcaatgatccttgtggatggacagccacgccaggccaagggtgagctggggctctcccaaatgctccacattgccagtcagatcgcctcgggtatggtgtacctggcctcccagcactttgtgcaccgagacctggccaccaggaactgcctggttggagcgaatctgctagtgaagattggggacttcggcatgtccagagatgtctacagcacggattattacaggctctttaatccatctggaaatgatttttgtatatggtgtgaggtgggaggacacaccatgctccccattcgctggatgcctcctgaaagcatcatgtaccggaagttcactacagagagtgatgtatggagcttcggggtgatcctctgggagatcttcacctatggaaagcagccatggttccaactctcaaacacggaggtcattgagtgcattacccaaggtcgtgttttggagcggccccgagtctgccccaaagaggtgtacgatgtcatgctggggtgctggcagagggaaccacagcagcggttgaacatcaaggagatctacaaaatcctccatgctttggggaaggccaccccaatctacctggacattcttggctag

SEQ ID NO: 738 - DNA, 3270 bp, Homo sapiens
atggggacttcccatccggcgttcctggtcttaggctgtcttctcacagggctgagcctaatcctctgccagctttcattaccctctatccttccaaatgaaaatgaaaaggttgtgcagctgaattcatccttttctctgagatgctttggggagagtgaagtgagctggcagtaccccatgtctgaagaagagagctccgatgtggaaatcagaaatgaagaaaacaacagcggcctttttgtgacggtcttggaagtgagcagtgcctcggcggcccacacagggttgtacacttgctattacaaccacactcagacagaagagaatgagcttgaaggcaggcacatttacatctatgtgccagacccagatgtagcctttgtacctctaggaatgacggattatttagtcatcgtggaggatgatgattctgccattataccttgtcgcacaactgatcccgagactcctgtaaccttacacaacagtgagggggtggtacctgcctcctacgacagcagacagggctttaatgggaccttcactgtagggccctatatctgtgaggccaccgtcaaaggaaagaagttccagaccatcccatttaatgtttatgctttaaaagcaacatcagagctggatctagaaatggaagcttttaaaaccgtgtataagtcaggggaaacgattgtggtcacctgtgctgtttttaacaatgaggtggttgaccttcaatggacttaccctggagaagtgaaaggcaaaggcatcacaatgctggaagaaatcaaagtcccatccatcaaattggtgtacactttgacggtccccgaggccacggtgaaagacagtggagattacgaatgtgctgcccgccaggctaccagggaggtcaaagaaatgaagaaagtcactatttctgtccatgagaaaggtttcattgaaatcaaacccaccttcagccagttggaagctgtcaacctgcatgaagtcaaacattttgttgtagaggtgcgggcctacccacctcccaggatatcctggctgaaaaacaatctgactctgattgaaaatctcactgagatcaccactgatgtggaaaagattcaggaaataaggtatcgaagcaaattaaagctgatccgtgctaaggaagaagacagtggccattatactattgtagctcaaaatgaagatgctgtgaagagctatacttttgaactgttaactcaagttccttcatccattctggacttggtcgatgatcaccatggctcaactgggggacagacggtgaggtgcacagctgaaggcacgccgcttcctgatattgagtggatgatatgcaaagatattaagaaatgtaataatgaaacttcctggactattttggccaacaatgtctcaaacatcatcacggagatccactcccgagacaggagtaccgtggagggccgtgtgactttcgccaaagtggaggagaccatcgccgtgcgatgcctggctaagaatctccttggagctgagaaccgagagctgaagctggtggctcccaccctgcgttctgaactcacggtggctgctgcagtcctggtgctgttggtgattgtgatcatctcacttattgtcctggttgtcatttggaaacagaaaccgaggtatgaaattcgctggagggtcattgaatcaatcagcccagatggacatgaatatatttatgtggacccgatgcagctgccttatgactcaagatgggagtttccaagagatggactagtgcttggtcgggtcttggggtctggagcgtttgggaaggtggttgaaggaacagcctatggattaagccggtcccaacctgtcatgaaagttgcagtgaagatgctaaaacccacggccagatccagtgaaaaacaagctctcatgtctgaactgaagataatgactcacctggggccacatttgaacattgtaaacttgctgggagcctgcaccaagtcaggccccatttacatcatcacagagtattgcttctatggagatttggtcaactatttgcataagaatagggatagcttcctgagccaccacccagagaagccaaagaaagagctggatatctttggattgaaccctgctgatgaaagcacacggagctatgttattttatcttttgaaaacaatggtgactacatggacatgaagcaggctgatactacacagtatgtccccatgctagaaaggaaagaggtttctaaatattccgacatccagagatcactctatgatcgtccagcctcatataagaagaaatctatgttagactcagaagtcaaaaacctcctttcagatgataactcagaaggccttactttattggatttgttgagcttcacctatcaagttgcccgaggaatggagtttttggcttcaaaaaattgtgtccaccgtgatctggctgctcgcaacgtcctcctggcacaaggaaaaattgtgaagatctgtgactttggcctggccagagacatcatgcatgattcgaactatgtgtcgaaaggcagtacctttctgcccgtgaagtggatggctcctgagagcatctttgacaacctctacaccacactgagtgatgtctggtcttatggcattctgctctgggagatcttttcccttggtggcaccccttaccccggcatgatggtggattctactttctacaataagatcaagagtgggtaccggatggccaagcctgaccacgctaccagtgaagtctacgagatcatggtgaaatgctggaacagtgagccggagaagagaccctccttttaccacctgagtgagattgtggagaatctgctgcctggacaatataaaaagagttatgaaaaaattcacctggacttcctgaagagtgaccatcctgctgtggcacgcatgcgtgtggactcagacaatgcatacattggtgtcacctacaaaaacgaggaagacaagctgaaggactgggagggtggtctggatgagcagagactgagcgctgacagtggctacatcattcctctgcctgacattgaccctgtccctgaggaggaggacctgggcaagaggaacagacacagctcgcagacctctgaagagagtgccattgagacgggttccagcagttccaccttcatcaagagagaggacgagaccattgaagacatcgacatgatggacgacatcggcatagactcttcagacctggtggaagacagcttcctgtaa

SEQ ID NO: 739 - DNA, 3270 bp, Homo sapiens
atggggacttcccatccggcgttcctggtcttaggctgtcttctcacagggctgagcctaatcctctgccagctttcattaccctctatccttccaaatgaaaatgaaaaggttgtgcagctgaattcatccttttctctgagatgctttggggagagtgaagtgagctggcagtaccccatgtctgaagaagagagctccgatgtggaaatcagaaatgaagaaaacaacagcggcctttttgtgacggtcttggaagtgagcagtgcctcggcggcccacacagggttgtacacttgctattacaaccacactcagacagaagagaatgagcttgaaggcaggcacatttacatctatgtgccagacccagatgtagcctttgtacctctaggaatgacggattatttagtcatcgtggaggatgatgattctgccattataccttgtcgcacaactgatcccgagactcctgtaaccttacacaacagtgagggggtggtacctgcctcctacgacagcagacagggctttaatgggaccttcactgtagggccctatatctgtgaggccaccgtcaaaggaaagaagttccagaccatcccatttaatgtttatgctttaaaagcaacatcagagctggatctagaaatggaagctcttaaaaccgtgtataagtcaggggaaacgattgtggtcacctgtgctgtttttaacaatgaggtggttgaccttcaatggacttaccctggagaagtgaaaggcaaaggcatcacaatgctggaagaaatcaaagtcccatccatcaaattggtgtacactttgacggtccccgaggccacggtgaaagacagtggagattacgaatgtgctgcccgccaggctaccagggaggtcaaagaaatgaagaaagtcactatttctgtccatgagaaaggtttcattgaaatcaaacccaccttcagccagttggaagctgtcaacctgcatgaagtcaaacattttgttgtagaggtgcgggcctacccacctcccaggatatcctggctgaaaaacaatctgactctgattgaaaatctcactgagatcaccactgatgtggaaaagattcaggaaataaggtatcgaagcaaattaaagctgatccgtgctaaggaagaagacagtggccattatactattgtagctcaaaatgaagatgctgtgaagagctatacttttgaactgttaactcaagttccttcatccattctggacttggtcgatgatcaccatggctcaactgggggacagacggtgaggtgcacagctgaaggcacgccgcttcctgatattgagtggatgatatgcaaagatattaagaaatgtaataatgaaacttcctggactattttggccaacaatgtctcaaacatcatcacggagatccacccccgagacaggagtaccgtggagggccgtgtgactttcgccaaagtggaggagaccatcgccgtgcgatgcctggctaagaatctccttggagctgagaaccgagagctgaagctggtggctcccaccctgcgttctgaactcacggtggctgctgcagtcctggtgctgttggtgattgtgatcatctcacttattgtcctggttgtcatttggaaacagaaaccgaggtatgaaattcgctggagggtcattgaatcaatcagcccagatggacatgaatatatttatgtggacccgatgcagctgccttatgactcaagatgggagtttccaagagatggactagtgcttggtcgggtcttggggtctggagcgtttgggaaggtggttgaaggaacagcctatggattaagccggtcccaacctgtcatgaaagttgcagtgaagatgctaaaacccacggccagatccagtgaaaaacaagctctcatgtctgaactgaagataatgactcacctggggccacatttgaacattgtaaacttgctgggagcctgcaccaagtcaggccccatttacatcatcacagagtattgcttctatggagatttggtcaactatttgcataagaatagggatagcttcctgagccaccacccagagaagccaaagaaagagctggatatctttggattgaaccctgctgatgaaagcacacggagctatgttattttatcttttgaaaacaatggtgactacatggacatgaagcaggctgatactacacagtatgtccccatgctagaaaggaaagaggtttctaaatattccgacatccagagatcactctatgatcgtccagcctcatataagaagaaatctatgttagactcagaagtcaaaaacctcctttcagatgataactcagaaggccttactttattggatttgttgagcttcacctatcaagttgcccgaggaatggagtttttggcttcaaaaaattgtgtccaccgtgatctggctgctcgcaacgtcctcctggcacaaggaaaaattgtgaagatctgtgactttggcctggccagagacatcatgcatgattcgaactatgtgtcgaaaggcagtacctttctgcccgtgaagtggatggctcctgagagcatctttgacaacctctacaccacactgagtgatgtctggtcttatggcattctgctctgggagatcttttcccttggtggcaccccttaccccggcatgatggtggattctactttctacaataagatcaagagtgggtaccggatggccaagcctgaccacgctaccagtgaagtctacgagatcatggtgaaatgctggaacagtgagccggagaagagaccctccttttaccacctgagtgagattgtggagaatctgctgcctggacaatataaaaagagttatgaaaaaattcacctggacttcctgaagagtgaccatcctgctgtggcacgcatgcgtgtggactcagacaatgcatacattggtgtcacctacaaaaacgaggaagacaagctgaaggactgggagggtggtctggatgagcagagactgagcgctgacagtggctacatcattcctctgcctgacattgaccctgtccctgaggaggaggacctgggcaagaggaacagacacagctcgcagacctctgaagagagtgccattgagacgggttccagcagttccaccttcatcaagagagaggacgagaccattgaagacatcgacatgatggacgacatcggcatagactcttcagacctggtggaagacagcttcctgtaa

SEQ ID NO: 740 - DNA, 3321 bp, Homo sapiens
atgcggcttccgggtgcgatgccagctctggccctcaaaggcgagctgctgttgctgtctctcctgttacttctggaaccacagatctctcagggcctggtcgtcacacccccggggccagagcttgtcctcaatgtctccagcaccttcgttctgacctgctcgggttcagctccggtggtgtgggaacggatgtcccaggagcccccacaggaaatggccaaggcccaggatggcaccttctccagcgtgctcacactgaccaacctcactgggctagacacgggagaatacttttgcacccacaatgactcccgtggactggagaccgatgagcggaaacggctctacatctttgtgccagatcccaccgtgggcttcctccctaatgatgccgaggaactattcatctttctcacggaaataactgagatcaccattccatgccgagtaacagacccacagctggtggtgacactgcacgagaagaaaggggacgttgcactgcctgtcccctatgatcaccaacgtggcttttctggtatctttgaggacagaagctacatctgcaaaaccaccattggggacagggaggtggattctgatgcctactatgtctacagactccaggtgtcatccatcaacgtctctgtgaacgcagtgcagactgtggtccgccagggtgagaacatcaccctcatgtgcattgtgatcgggaatgaggtggtcaacttcgagtggacatacccccgcaaagaaagtgggcggctggtggagccggtgactgacttcctcttggatatgccttaccacatccgctccatcctgcacatccccagtgccgagttagaagactcggggacctacacctgcaatgtgacggagagtgtgaatgaccatcaggatgaaaaggccatcaacatcaccgtggttgagagcggctacgtgcggctcctgggagaggtgggcacactacaatttgctgagctgcatcggagccggacactgcaggtagtgttcgaggcctacccatcgcccactgtcctgtggttcaaagacaaccgcaccctgggcgactccagcgctggcgaaatcgccctgtccacgcgcaacgtgtcggagacccggtatgtgtcagagctgacactggttcgcgtgaaggtggcagaggctggccactacaccatgcgggccttccatgaggatgctgaggtccagctctccttccagctacagatcaatgtccctgtccgagtgctggagctaagtgagagccaccctgacagtggggaacagacagtccgctgtcgtggccggggcatgccccagccgaacatcatctggtctgcctgcagagacctcaaaaggtgtccacgtgagctgccgcccacgctgctggggaacagttccgaagaggagagccagctggagactaacgtgacgtactgggaggaggagcaggagtttgaggtggtgagcacactgcgtctgcagcacgtggatcggccactgtcggtgcgctgcacgctgcgcaacgctgtgggccaggacacgcaggaggtcatcgtggtgccacactccttgccctttaaggtggtggtgatctcagccatcctggccctggtggtgctcaccatcatctcccttatcatcctcatcatgctttggcagaagaagccacgttacgagatccgatggaaggtgattgagtctgtgagctctgacggccatgagtacatctacgtggaccccatgcagctgccctatgactccacgtgggagctgccgcgggaccagcttgtgctgggacgcaccctcggctctggggcctttgggcaggtggtggaggccacggctcatggcctgagccattctcaggccacgatgaaagtggccgtcaagatgcttaaatccacagcccgcagcagtgagaagcaagcccttatgtcggagctgaagatcatgagtcaccttgggccccacctgaacgtggtcaacctgttgggggcctgcaccaaaggaggacccatctatatcatcactgagtactgccgctacggagacctggtggactacctgcaccgcaacaaacacaccttcctgcagcaccactccgacaagcgccgcccgcccagcgcggagctctacagcaatgctctgcccgttgggctccccctgcccagccatgtgtccttgaccggggagagcgacggtggctacatggacatgagcaaggacgagtcggtggactatgtgcccatgctggacatgaaaggagacgtcaaatatgcagacatcgagtcctccaactacatggccccttacgataactacgttccctctgcccctgagaggacctgccgagcaactttgatcaacgagtctccagtgctaagctacatggacctcgtgggcttcagctaccaggtggccaatggcatggagtttctggcctccaagaactgcgtccacagagacctggcggctaggaacgtgctcatctgtgaaggcaagctggtcaagatctgtgactttggcctggctcgagacatcatgcgggactcgaattacatctccaaaggcagcacctttttgcctttaaagtggatggctccggagagcatcttcaacagcctctacaccaccctgagcgacgtgtggtccttcgggatcctgctctgggagatcttcaccttgggtggcaccccttacccagagctgcccatgaacgagcagttctacaatgccatcaaacggggttaccgcatggcccagcctgcccatgcctccgacgagatctatgagatcatgcagaagtgctgggaagagaagtttgagattcggccccccttctcccagctggtgctgcttctcgagagactgttgggcgaaggttacaaaaagaagtaccagcaggtggatgaggagtttctgaggagtgaccacccagccatccttcggtcccaggcccgcttgcctgggttccatggcctccgatctcccctggacaccagctccgtcctctatactgccgtgcagcccaatgagggtgacaacgactatatcatccccctgcctgaccccaaacccgaggttgctgacgagggcccactggagggttcccccagcctagccagctccaccctgaatgaagtcaacacctcctcaaccatctcctgtgacagccccctggagccccaggacgaaccagagccagagccccagcttgagctccaggtggagccggagccagagctggaacagttgccggattcggggtgccctgcgcctcgggcggaagcagaggatagcttcctgtag

SEQ ID NO: 741 - DNA, 3321 bp, Homo sapiens
atgcggcttccgggtgcgatgccagctctggccctcaaaggcgagctgctgttgctgtctctcctgttacttctggaaccacagatctctcagggcctggtcgtcacacccccggggccagagcttgtcctcaatgtctccagcaccttcgttctgacctgctcgggttcagctccggtggtgtgggaacggatgtcccaggagcccccacaggaaatggccaaggcccaggatggcaccttctccagcgtgctcacactgaccaacctcactgggctagacacgggagaatacttttgcacccacaatgactcccgtggactggagaccgatgagcggaaacggctctacatctttgtgccagatcccaccgtgggcttcctccctaatgatgccgaggaactattcatctttctcacggaaataactgagatcaccattccatgccgagtaacagacccacagctggtggtgacactgcacgagaagaaaggggacgttgcactgcctgtcccctatgatcaccaacgtggcttttctggtatctttgaggacagaagctacatctgcaaaaccaccattggggacagggaggtggattctgatgcctactatgtctacagactccaggtgtcatccatcaacgtctctgtgaacgcagtgcagactgtggtccgccagggtgagaacatcaccctcatgtgcattgtgatcgggaatgaggtggtcaacttcgagtggacatacccccgcaaagaaagtgggcggctggtggagccggtgactgacttcctcttggatatgccttaccacatccgctccatcctgcacatccccagtgccgagttagaagactcggggacctacacctgcaatgtgacggagagtgtgaatgaccatcaggatgaaaaggccatcaacatcaccgtggttgagagcggctacgtgcggctcctgggagaggtgggcacactacaatttgctgagctgcatcggagccggacactgcaggtagtgttcgaggcctacccaccgcccactgtcctgtggttcaaagacaaccgcaccctgggcgactccagcgctggcgaaatcgccctgtccacgcgcaacgtgtcggagacccggtatgtgtcagagctgacactggttcgcgtgaaggtggcagaggctggccactacaccatgcgggccttccatgaggatgctgaggtccagctctccttccagctacagatcaatgtccctgtccgagtgctggagctaagtgagagccaccctgacagtggggaacagacagtccgctgtcgtggccggggcatgccccagccgaacatcatctggtctgcctgcagagacctcaaaaggtgtccacgtgagctgccgcccatgctgctggggaacagttccgaagaggagagccagctggagactaacgtgacgtactgggaggaggagcaggagtttgaggtggtgagcacactgcgtctgcagcacgtggatcggccactgtcggtgcgctgcacgctgcgcaacgctgtgggccaggacacgcaggaggtcatcgtggtgccacactccttgccctttaaggtggtggtgatctcagccatcctggccctggtggtgctcaccatcatctcccttatcatcctcatcatgctttggcagaagaagccacgttacgagatccgatggaaggtgattgagtctgtgagctctgacggccatgagtacatctacgtggaccccatgcagctgccctatgactccacgtgggagctgccgcgggaccagcttgtgctgggacgcaccctcggctctggggcctttgggcaggtggtggaggccacggctcatggcctgagccattctcaggccacgatgaaagtggccgtcaagatgcttaaatccacagcccgcagcagtgagaagcaagcccttatgtcggagctgaagatcatgagtcaccttgggccccacctgaacgtggtcaacctgttgggggcctgcaccaaaggaggacccatctatatcatcactgagtactgccgctacggagacctggtggactacctgcaccgcaacaaacacaccttcctgcagcaccactccgacaagcgccgcccgcccagcgcggagctctacagcaatgctctgcccgttgggctccccctgcccagccatgtgtccttgaccggggagagcgacggtggctacatggacatgagcaaggacgagtcggtggactatgtgcccatgctggacatgaaaggagacgtcaaatatgcagacatcgagtcctccaactacatggccccttacgataactacgttccctctgcccctgagaggacctgccgagcaactttgatcaacgagtctccagtgctaagctacatggacctcgtgggcttcagctaccaggtggccaatggcatggagtttctggcctccaagaactgcgtccacagagacctggcggctaggaacgtgctcatctgtgaaggcaagctggtcaagatctgtgactttggcctggctcgagacatcatgcgggactcgaattacatctccaaaggcagcacctttttgcctttaaagtggatggctccggagagcatcttcaacagcctctacaccaccctgagcgacgtgtggtccttcgggatcctgctctgggagatcttcaccttgggtggcaccccttacccagagctgcccatgaacgagcagttctacaatgccatcaaacggggttaccgcatggcccagcctgcccatgcctccgacgagatctatgagatcatgcagaagtgctgggaagagaagtttgagattcggccccccttctcccagctggtgctgcttctcgagagactgttgggcgaaggttacaaaaagaagtaccagcaggtggatgaggagtttctgaggagtgaccacccagccatccttcggtcccaggcccgcttgcctgggttccatggcctccgatctcccctggacaccagctccgtcctctatactgccgtgcagcccaatgagggtgacaacgactatatcatccccctgcctgaccccaaacccgaggttgctgacgagggcccactggagggttcccccagcctagccagctccaccctgaatgaagtcaacacctcctcaaccatctcctgtgacagccccctggagccccaggacgaaccagagccagagccccagcttgagctccaggtggagccggagccagagctggaacagttgccggattcggggtgccctgcgcctcgggcggaagcagaggatagcttcctgtag

SEQ ID NO: 742 - DNA, 1176 bp, Homo sapiens
atgacgcgccggggccggcggaggagcagccacttcctggggccgccggccggggccgctggctgcactcagcgccggagccgggagctagcggccgccgccatgtcccaccagaccggcatccaagcaagtgaagatgttaaagagatctttgccagagccagaaatggaaagtacagacttctgaaaatatctattgaaaatgagcaacttgtgattggatcatatagtcagccttcagattcctgggataaggattatgattcctttgttttacccctgttggaggacaaacaaccatgctatatattattcaggttagattctcagaatgcccagggatatgaatggatattcattgcatggtctccagatcattctcatgttcgtcaaaaaatgttgtatgcagcaacaagagcaactctgaagaaggaatttggaggtggccacattaaagatgaagtatttggaacagtaaaggaagatgtatcattacatggatataaaaaatacttgctgtcacaatcttcccctgccccactgactgcagctgaggaagaactacgacagattaaaatcaatgagagaccagaggatcatattggggtacagactgacgtgggtgtggacactaagcatcaaacactacaaggagtagcatttcccatttctcgagaagcctttcaggctttggaaaaattgaataatagacagctcaactatgtgcagttggaaatagatataaaaaatgaaattataattttggccaacacaacaaatacagaactgaaagatttgccaaagaggattcccaaggattcagctcgttaccatttctttctgtataaacattcccatgaaggagactatttagagtccatagtttttatttattcaatgcctggatacacatgcagtataagagagcggatgctgtattctagctgcaagagccgtctgctagaaattgtagaaagacaactacaaatggatgtaattagaaagatcgagatagacaatggggatgagttgactgcagacttcctttatgaagaagtacatcccaagcagcatgcacacaagcaaagttttgcaaaaccaaaaggtcctgcaggaaaaagaggaattcgaagactaattaggggcccagcggaaactgaagctactactgattaa

SEQ ID NO: 743 - DNA, 3030 bp, Homo sapiens
atgtctggggtgtccgagcccctgagtcgagtaaagttgggcacgttacgccggcctgaaggccctgcagagcccatggtggtggtaccagtagatgtggaaaaggaggacgtgcgtatcctcaaggtctgcttctatagcaacagcttcaatcctgggaaaaacttcaaactggtcaaatgcactgtccagacggagatccgggagatcatcacctccatcctgctgagcgggcggatcgggcccaacatccggttggctgagtgctatgggctgaggctgaagcacatgaagtccgatgagatccactggctgcacccacagatgacggtgggtgaggtgcaggacaagtatgagtgtctgcacgtggaagccgagtggaggtatgaccttcaaatccgctacttgccagaagacttcatggagagcctgaaggaggacaggaccacgctgctctatttttaccaacagctccggaacgactacatgcagcgctacgccagcaaggtcagcgagggcatggccctgcagctgggctgcctggagctcaggcggttcttcaaggatatgccccacaatgcacttgacaagaagtccaacttcgagctcctagaaaaggaagtggggctggacttgtttttcccaaagcagatgcaggagaacttaaagcccaaacagttccggaagatgatccagcagaccttccagcagtacgcctcgctcagggaggaggagtgcgtcatgaagttcttcaacactctcgccggcttcgccaacatcgaccaggagacctaccgctgtgaactcattcaaggatggaacattactgtggacctggtcattggccctaaagggatccgccagctgactagtcaggacgcaaagcccacctgcctggccgagttcaagcagatcaggtccatcaggtgcctcccgctggaggagggccaggcagtacttcagctgggcattgaaggtgccccccaggccttgtccatcaaaacctcatccctagcagaggctgagaacatggctgacctcatagacggctactgccggctgcagggtgagcaccaaggctctctcatcatccatcctaggaaagatggtgagaagcggaacagcctgccccagatccccatgctaaacctggaggcccggcggtcccacctctcagagagctgcagcatagagtcagacatctacgcagagattcccgacgaaaccctgcgaaggcccgtaggtccacagtatggcattgcccgtgaagatgtggtcctgaatcgtattcttggggaaggcttttttggggaggtctatgaaggtgtctacacaaatcacaaaggggagaaaatcaatgtagctgtcaagacctgcaagaaagactgcactctggacaacaaggagaagttcatgagcgaggcagtgatcatgaagaacctcgaccacccgcacatcgtgaagctgatcggcatcattgaagaggagcccacctggatcatcatggaattgtatccctatggggagctgggccactacctggagcggaacaagaactccctgaaggtgctcaccctcgtgctgtactcactgcagatatgcaaagccatggcctacctggagagcatcaactgcgtgcacagggacattgctgtccggaacatcctggtggcctcccctgagtgtgtgaagctgggggactttggtctttcccggtacattgaggacgaggactattacaaagcctctgtgactcgtctccccatcaaatggatgtccccagagtccattaacttccgacgcttcacgacagccagtgacgtctggatgttcgccgtgtgcatgtgggagatcctgagctttgggaagcagcccttcttctggctggagaacaaggatgtcatcggggtgctggagaaaggagaccggctgcccaagcctgatctctgtccaccggtcctttataccctcatgacccgctgctgggactacgaccccagtgaccggccccgcttcaccgagctggtgtgcagcctcagtgacgtttatcagatggagaaggacattgccatggagcaagagaggaatgctcgctaccgaacccccaaaatcttggagcccacagccttccaggaacccccacccaagcccagccgacctaagtacagaccccctccgcaaaccaacctcctggctccaaagctgcagttccaggttcctgagggtctgtgtgccagctctcctacgctcaccagccctatggagtatccatctcccgttaactcactgcacaccccacctctccaccggcacaatgtcttcaaacgccacagcatgcgggaggaggacttcatccaacccagcagccgagaagaggcccagcagctgtgggaggctgaaaaggtcaaaatgcggcaaatcctggacaaacagcagaagcagatggtggaggactaccagtggctcaggcaggaggagaagtccctggaccccatggtttatatgaatgataagtccccattgacgccagagaaggaggtcggctacctggagttcacagggcccccacagaagcccccgaggctgggcgcacagtccatccagcccacagctaacctggaccggactgatgacctggtgtacctcaatgtcatggagctggtgcgggccgtgctggagctcaagaatgagctctgtcagctgccccccgagggctacgtggtggtggtgaagaatgtggggctgaccctgcggaagctcatcgggagcgtggatgatctcctgccttccttgccgtcatcttcacggacagagatcgagggcacccagaaactgctcaacaaagacctggcagagctcatcaacaagatgcggctggcacagcagaacgccgtgacctccctaagtgaggagtgcaagaggcagatgctgacggcttcacacaccctggctgtggacgccaagaacctgctcgacgctgtggaccaggccaaggttctggccaatctggcccacccacctgcagagtga

SEQ ID NO: 744 - DNA, 2904 bp, Homo sapiens
atgtctggggtgtccgagcccctgagtcgagtaaagttgggcacgttacgccggcctgaaggccctgcagagcccatggtggtggtaccagtagatgtggaaaaggaggacgtgcgtatcctcaaggtctgcttctatagcaacagcttcaatcctgggaaaaacttcaaactggtcaaatgcactgtccagacggagatccgggagatcatcacctccatcctgctgagcgggcggatcgggcccaacatccggttggctgagtgctatgggctgaggctgaagcacatgaagtccgatgagatccactggctgcacccacagatgacggtgggtgaggtgcaggacaagtatgagtgtctgcacgtggaagccgagtggaggtatgaccttcaaatccgctacttgccagaagacttcatggagagcctgaaggaggacaggaccacgctgctctatttttaccaacagctccggaacgactacatgcagcgctacgccagcaaggtcagcgagggcatggccctgcagctgggctgcctggagctcaggcggttcttcaaggatatgccccacaatgcacttgacaagaagtccaacttcgagctcctagaaaaggaagtggggctggacttgtttttcccaaagcagatgcaggagaacttaaagcccaaacagttccggaagatgatccagcagaccttccagcagtacgcctcgctcagggaggaggagtgcgtcatgaagttcttcaacactctcgccggcttcgccaacatcgaccaggagacctaccgctgtgaactcattcaaggatggaacattactgtggacctggtcattggccctaaagggatccgccagctgactagtcaggacgcaaagcccacctgcctggccgagttcaagcagatcaggtccatcaggtgcctcccgctggaggagggccaggcagtacttcagctgggcattgaaggtgccccccaggccttgtccatcaaaacctcatccctagcagaggctgagaacatggctgacctcatagacggctactgccggctgcagggtgagcaccaaggctctctcatcatccatcctaggaaagatggtgagaagcggaacagcctgccccagatccccatgctaaacctggaggcccggcggtcccacctctcagagagctgcagcatagagtcagacatctacgcagagattcccgacgaaaccctgcgaaggcccggaggtccacagtatggcattgcccgtgaagatgtggtcctgaatcgtattcttggggaaggcttttttggggaggtctatgaaggtgtctacacaaatcacaaaggggagaaaatcaatgtagctgtcaagacctgcaagaaagactgcactctggacaacaaggagaagttcatgagcgaggcagtgatcatgaagaacctcgaccacccgcacatcgtgaagctgatcggcatcattgaagaggagcccacctggatcatcatggaattgtatccctatggggagctgggccactacctggagcggaacaagaactccctgaaggtgctcaccctcgtgctgtactcactgcagatatgcaaagccatggcctacctggagagcatcaactgcgtgcacagggacattgctgtccggaacatcctggtggcctcccctgagtgtgtgaagctgggggactttggtctttcccggtacattgaggacgaggactattacaaagcctctgtgactcgtctccccatcaaatggatgtccccagagtccattaacttccgacgcttcacgacagccagtgacgtctggatgttcgccgtgtgcatgtgggagatcctgagctttgggaagcagcccttcttctggctggagaacaaggatgtcatcggggtgctggagaaaggagaccggctgcccaagcctgatctctgtccaccggtcctttataccctcatgacccgctgctgggactacgaccccagtgaccggccccgcttcaccgagctggtgtgcagcctcagtgacgtttatcagatggagaaggacattgccatggagcaagagaggaatgctcgctaccgaacccccaaaatcttggagcccacagccttccaggaacccccacccaagcccagccgacctaagtacagaccccctccgcaaaccaacctcctggctccaaagctgcagttccaggaggaggacttcatccaacccagcagccgagaagaggcccagcagctgtgggaggctgaaaaggtcaaaatgcggcaaatcctggacaaacagcagaagcagatggtggaggactaccagtggctcaggcaggaggagaagtccctggaccccatggtttatatgaatgataagtccccattgacgccagagaaggaggtcggctacctggagttcacagggcccccacagaagcccccgaggctgggcgcacagtccatccagcccacagctaacctggaccggactgatgacctggtgtacctcaatgtcatggagctggtgcgggccgtgctggagctcaagaatgagctctgtcagctgccccccgagggctacgtggtggtggtgaagaatgtggggctgaccctgcggaagctcatcgggagcgtggatgatctcctgccttccttgccgtcatcttcacggacagagatcgagggcacccagaaactgctcaacaaagacctggcagagctcatcaacaagatgcggctggcacagcagaacgccgtgacctccctaagtgaggagtgcaagaggcagatgctgacggcttcacacaccctggctgtggacgccaagaacctgctcgacgctgtggaccaggccaaggttctggccaatctggcccacccacctgcagagtga

SEQ ID NO: 745 - DNA, 3030 bp, Homo sapiens
atgtctggggtgtccgagcccctgagtcgagtaaagttgggcacgttacgccggcctgaaggccctgcagagcccatggtggtggtaccagtagatgtggaaaaggaggacgtgcgtatcctcaaggtctgcttctatagcaacagcttcaatcctgggaaaaacttcaaactggtcaaatgcactgtccagacggagatccgggagatcatcacctccatcctgctgagcgggcggatcgggcccaacatccggttggctgagtgctatgggctgaggctgaagcacatgaagtccgatgagatccactggctgcacccacagatgacggtgggtgaggtgcaggacaagtatgagtgtctgcacgtggaagccgagtggaggtatgaccttcaaatccgctacttgccagaagacttcatggagagcctgaaggaggacaggaccacgctgctctatttttaccaacagctccggaacgactacatgcagcgctacgccagcaaggtcagcgagggcatggccctgcagctgggctgcctggagctcaggcggttcttcaaggatatgccccacaatgcacttgacaagaagtccaacttcgagctcctagaaaaggaagtggggctggacttgtttttcccaaagcagatgcaggagaacttaaagcccaaacagttccggaagatgatccagcagaccttccagcagtacgcctcgctcagggaggaggagtgcgtcatgaagttcttcaacactctcgccggcttcgccaacatcgaccaggagacctaccgctgtgaactcattcaaggatggaacattactgtggacctggtcattggccctaaagggatccgccagctgactagtcaggacgcaaagcccacctgcctggccgagttcaagcagatcaggtccatcaggtgcctcccgctggaggagggccaggcagtacttcagctgggcattgaaggtgccccccaggccttgtccatcaaaacctcatccctagcagaggctgagaacatggctgacctcatagacggctactgccggctgcagggtgagcaccaaggctctctcatcatccatcctaggaaagatggtgagaagcggaacagcctgccccagatccccatgctaaacctggaggcccggcggtcccacctctcagagagctgcagcatagagtcagacatctacgcagagattcccgacgaaaccctgcgaaggcccggaggtccacagtatggcattgcccgtgaagatgtggtcctgaatcgtattcttggggaaggcttttttggggaggtctatgaaggtgtctacacaaatcacaaaggggagaaaatcaatgtagctgtcaagacctgcaagaaagactgcactctggacaacaaggagaagttcatgagcgaggcagtgatcatgaagaacctcgaccacccgcacatcgtgaagctgatcggcatcattgaagaggagcccacctggatcatcatggaattgtatccctatggggagctgggccactacctggagcggaacaagaactccctgaaggtgctcaccctcgtgctgtactcactgcagatatgcaaagccatggcctacctggagagcatcaactgcgtgcacagggacattgctgtccggaacatcctggtggcctcccctgagtgtgtgaagctgggggactttggtctttcccggtacattgaggacgaggactattacaaagcctctgtgactcgtctccccatcaaatggatgtccccagagtccattaacttccgacgcttcacgacagccagtgacgtctggatgttcgccgtgtgcatgtgggagatcctgagctttgggaagcagcccttcttctggctggagaacaaggatgtcatcggggtgctggagaaaggagaccggctgcccaagcctgatctctgtccaccggtcctttataccctcatgacccgctgctgggactacgaccccagtgaccggccccgcttcaccgagctggtgtgcagcctcagtgacgtttatcagatggagaaggacattgccatggagcaagagaggaatgctcgctaccgaacccccaaaatcttggagcccacagccttccaggaacccccacccaagcccagccgacctaagtacagaccccctccgcaaaccaacctcctggctccaaagctgcagttccaggttcctgagggtctgtgtgccagctctcctacgctcaccagccctatggagtatccatctcccgttaactcactgcacaccccacctctccaccggcacaatgtcttcaaacgccacagcatgcgggaggaggacttcatccaacccagcagccgagaagaggcccagcagctgtgggaggctgaaaaggtcaaaatgcggcaaatcctggacaaacagcagaagcagatggtggaggactaccagtggctcaggcaggaggagaagtccctggaccccatggtttatatgaatgatacgtccccattgacgccagagaaggaggtcggctacctggagttcacagggcccccacagaagcccccgaggctgggcgcacagtccatccagcccacagctaacctggaccggactgatgacctggtgtacctcaatgtcatggagctggtgcgggccgtgctggagctcaagaatgagctctgtcagctgccccccgagggctacgtggtggtggtgaagaatgtggggctgaccctgcggaagctcatcgggagcgtggatgatctcctgccttccttgccgtcatcttcacggacagagatcgagggcacccagaaactgctcaacaaagacctggcagagctcatcaacaagatgcggctggcacagcagaacgccgtgacctccctaagtgaggagtgcaagaggcagatgctgacggcttcacacaccctggctgtggacgccaagaacctgctcgacgctgtggaccaggccaaggttctggccaatctggcccacccacctgcagagtga

SEQ ID NO: 746 - DNA, 3345 bp, Homo sapiens
atggcgaaggcgacgtccggtgccgcggggctgcgtctgctgttgctgctgctgctgccgctgctaggcaaagtggcattgggcctctacttctcgagggatgcttactgggagaagctgtatgtggaccaggcggccggcacgcccttgctgtacgtccatgccctgcgggacgcccctgaggaggtgcccagcttccgcctgggccagcatctctacggcacgtaccgcacacggctgcatgagaacaactggatctgcatccaggaggacaccggcctcctctaccttaaccggagcctggaccatagctcctgggagaagctcagtgtccgcaaccgcggctttcccctgctcaccgtctacctcaaggtcttcctgtcacccacatcccttcgtgagggcgagtgccagtggccaggctgtgcccgcgtatacttctccttcttcaacacctcctttccagcctgcagctccctcaagccccgggagctctgcttcccagagacaaggccctccttccgcattcgggagaaccgacccccaggcaccttccaccagttccgcctgctgcctgtgcagttcttgtgccccaacatcagcgtggcctacaggctcctggagggtgagggtctgcccttccgctgcgccccggacagcctggaggtgagcacgcgctgggccctggaccgcgagcagcgggagaagtacgagctggtggccgtgtgcaccgtgcacgccggcgcgcgcgaggaggtggtgatggtgcccttcccggtgaccgtgtacgacgaggacgactcggcgcccaccttccccgcgggcgtcgacaccgccagcgccgtggtggagttcaagcggaaggaggacaccgtggtggccacgctgcgtgtcttcgatgcagacgtggtacctgcatcaggggagctggtgaggcggtacacaagcacgctgctccccggggacacctgggcccagcagaccttccgggtggaacactggcccaacgagacctcggtccaggccaacggcagcttcgtgcgggcgaccgtacatgactataggctggttctcaaccggaacctctccatctcggagaaccgcaccatgcagctggcggtgctggtcaatgactcagacttccagggcccaggagcgggcgtcctcttgctccacttcaacgtgtcggtgctgccggtcagcctgcacctgcccagtacctactccctctccgtgagcaggagggctcgccgatttgcccagatcgggaaagtctgtgtggaaaactgccaggcattcagtggcatcaacgtccagtacaagctgcattcctctggtgccaactgcagcacgctaggggtggtcacctcagccgaggacacctcggggatcctgtttgtgaatgacaccaaggccctgcggcggcccaagtgtgccgaacttcactacatggtggtggccaccaaccagcagacctctaggcaggcccaggcccagctgcttgtaacagtggaggggtcatatgtggccgaggaggcgggctgccccctgtcctgtgcagtcagcaagagacggctggagtgtgaggagtgtggcggcctgggctccccaacaggcaggtgtgagtggaggcaaggagatggcaaagggatcaccaggaacttctccacctgctctcccagcaccaagacctgccccgacggccactgcgatgttgtggagacccaagacatcaacatttgccctcaggactgcctccggggcagcattgttgggggacacgagcctggggagccccgggggattaaagctggctatggcacctgcaactgcttccctgaggaggagaagtgcttctgcgagcccgaagacatccaggatccactgtgcgacgagctgtgccgcacggtgatcgcagccgctgtcctcttctccttcatcgtctcggtgctgctgtctgccttctgcatccactgctaccacaagtttgcccacaagccacccatctcctcagctgagatgaccttccggaggcccgcccaggccttcccggtcagctactcctcttccggtgcccgccggccctcgctggactccatggagaaccaggtctccgtggatgccttcaagatcctggaggatccaaagtgggaattccctcggaagaacttggttcttggaaaaactctaggagaaggcgaatttggaaaagtggtcaaggcaacggccttccatctgaaaggcagagcagggtacaccacggtggccgtgaagatgctgaaagagaacgcctccccgagtgagctgcgagacctgctgtcagagttcaacgtcctgaagcaggtcaaccacccacatgtcatcaaattgtatggggcctgcagccaggatggcccgctcctcctcatcgtggagtacgccaaatacggctccctgcggggcttcctccgcgagagccgcaaagtggggcctggctacctgggcagtggaggcagccgcaactccagctccctggaccacccggatgagcgggccctcaccatgggcgacctcatctcatttgcctggcagatctcacaggggatgcagtatctggccgagatgaagctcgttcatcgggacttggcagccagaaacatcctggtagctgaggggcggaagatgaagatttcggatttcggcttgtcccgagatgtttatgaagaggattcctacgtgaagaggagccagggtcggattccagttaaatggatggcaattgaatccctttttgatcatatctacaccacgcaaagtgatgtatggtcttttggtgtcctgctgtgggagatcgtgaccctagggggaaacccctatcctgggattcctcctgagcggctcttcaaccttctgaagaccggccaccggatggagaggccagacaactgcagcgaggagatgtaccgcctgatgctgcaatgctggaagcaggagccggacaaaaggccggtgtttgcggacatcagcaaagacctggagaagatgatggttaagaggagagactacttggaccttgcggcgtccactccatctgactccctgatttatgacgacggcctctcagaggaggagacaccgctggtggactgtaataatgcccccctccctcgagccctcccttccacatggattgaaaacaaactctatggcatgtcagacccgaactggcctggagagagtcctgtaccactcacgagagctgatggcactaacactgggtttccaagatatccaaatgatagtgtatatgctaactggatgctttcaccctcagcggcaaaattaatggacacgtttgatagttaa

SEQ ID NO: 747 - DNA, 3345 bp, Homo sapiens
atggcgaaggcgacgtccggtgccgcggggctgcgtctgctgttgctgctgctgctgccgctgctaggcaaagtggcattgggcctctacttctcgagggatgcttactgggagaagctgtatgtggaccaggcggccggcacgcccttgctgtacgtccatgccctgcgggacgcccctgaggaggtgcccagcttccgcctgggccagcatctctacggcacgtaccgcacacggctgcatgagaacaactggatctgcatccaggaggacaccggcctcctctaccttaaccggagcctggaccatagctcctgggagaagctcagtgtccgcaaccgcggctttcccctgctcaccgtctacctcaaggtcttcctgtcacccacatcccttcgtgagggcgagtgccagtggccaggctgtgcccgcgtatacttctccttcttcaacacctcctttccagcctgcagctccctcaagccccgggagctctgcttcccagagacaaggccctccttccgcattcgggagaaccgacccccaggcaccttccaccagttccgcctgctgcctgtgcagttcttgtgccccaacatcagcgtggcctacaggctcctggagggtgagggtctgcccttccgctgcgccccggacagcctggaggtgagcacgcgctgggccctggaccgcgagcagcgggagaagtacgagctggtggccgtgtgcaccgtgcacgccggcgcgcgcgaggaggtggtgatggtgcccttcccggtgaccgtgtacgacgaggacgactcggcgcccaccttccccgcgggcgtcgacaccgccagcgccgtggtggagttcaagcggaaggaggacaccgtggtggccacgctgcgtgtcttcgatgcagacgtggtacctgcatcaggggagctggtgaggcggtacacaagcacgctgctccccggggacacctgggcccagcagaccttccgggtggaacactggcccaacgagacctcggtccaggccaacggcagcttcgtgcgggcgaccgtacatgactataggctggttctcaaccggaacctctccatctcggagaaccgcaccatgcagctggcggtgctggtcaatgactcagacttccagggcccaggagcgggcgtcctcttgctccacttcaacgtgtcggtgctgccggtcagcctgcacctgcccagtacctactccctctccgtgagcaggagggctcgccgatttgcccagatcgggaaagtctgtgtggaaaactgccaggcattcagtggcatcaacgtccagtacaagctgcattcctctggtgccaactgcagcacgctaggggtggtcacctcagccgaggacacctcggggatcctgtttgtgaatgacaccaaggccctgcggcggcccaagtgtgccgaacttcactacatggtggtggccaccgaccagcagacctctaggcaggcccaggcccagctgcttgtaacagtggaggggtcatatgtggccgaggaggcgggctgccccctgtcctgtgcagtcagcaagagacggctggagtgtgaggagtgtggcggcctgggctccccaacaggcaggtgtgagtggaggcaaggagatggcaaagggatcaccaggaacttctccacctgctctcccagcaccaagacctgccccgacggccactgcgatgttgtggagacccaagacatcaacatttgccctcaggactgcctccggggcagcattgttgggggacacgagcctggggagccccgggggattaaagctggctatggcacctgcaactgcttccctgaggaggagaagtgcttctgcgagcccgaagacatccaggatccactgtgcgacgagctgtgccgcacggtgatcgcagccgctgtcctcttctccttcatcgtctcggtgctgctgtctgccttctgcatccactgctaccacaagtttgcccacaagccacccatctcctcagctgagatgaccttccggaggcccgcccaggccttcccggtcagctactcctcttccagtgcccgccggccctcgctggactccatggagaaccaggtctccgtggatgccttcaagatcctggaggatccaaagtgggaattccctcggaagaacttggttcttggaaaaactctaggagaaggcgaatttggaaaagtggtcaaggcaacggccttccatctgaaaggcagagcagggtacaccacggtggccgtgaagatgctgaaagagaacgcctccccgagtgagctgcgagacctgctgtcagagttcaacgtcctgaagcaggtcaaccacccacatgtcatcaaattgtatggggcctgcagccaggatggcccgctcctcctcatcgtggagtacgccaaatacggctccctgcggggcttcctccgcgagagccgcaaagtggggcctggctacctgggcagtggaggcagccgcaactccagctccctggaccacccggatgagcgggccctcaccatgggcgacctcatctcatttgcctggcagatctcacaggggatgcagtatctggccgagatgaagctcgttcatcgggacttggcagccagaaacatcctggtagctgaggggcggaagatgaagatttcggatttcggcttgtcccgagatgtttatgaagaggattcctacgtgaagaggagccagggtcggattccagttaaatggatggcaattgaatccctttttgatcatatctacaccacgcaaagtgatgtatggtcttttggtgtcctgctgtgggagatcgtgaccctagggggaaacccctatcctgggattcctcctgagcggctcttcaaccttctgaagaccggccaccggatggagaggccagacaactgcagcgaggagatgtaccgcctgatgctgcaatgctggaagcaggagccggacaaaaggccggtgtttgcggacatcagcaaagacctggagaagatgatggttaagaggagagactacttggaccttgcggcgtccactccatctgactccctgatttatgacgacggcctctcagaggaggagacaccgctggtggactgtaataatgcccccctccctcgagccctcccttccacatggattgaaaacaaactctatggcatgtcagacccgaactggcctggagagagtcctgtaccactcacgagagctgatggcactaacactgggtttccaagatatccaaatgatagtgtatatgctaactggatgctttcaccctcagcggcaaaattaatggacacgtttgatagttaa

SEQ ID NO: 748 - DNA, 3345 bp, Homo sapiens
atggcgaaggcgacgtccggtgccgcggggctgcgtctgctgttgctgctgctgctgccgctgctaggcaaagtggcattgggcctctacttctcgagggatgcttactgggagaagctgtatgtggaccaggcggccggcacgcccttgctgtacgtccatgccctgcgggacgcccctgaggaggtgcccagcttccgcctgggccagcatctctacggcacgtaccgcacacggctgcatgagaacaactggatctgcatccaggaggacaccggcctcctctaccttaaccggagcctggaccatagctcctgggagaagctcagtgtccgcaaccgcggctttcccctgctcaccgtctacctcaaggtcttcctgtcacccacatcccttcgtgagggcgagtgccagtggccaggctgtgcccgcgtatacttctccttcttcaacacctcctttccagcctgcagctccctcaagccccgggagctctgcttcccagagacaaggccctccttccgcattcgggagaaccgacccccaggcaccttccaccagttccgcctgctgcctgtgcagttcttgtgccccaacatcagcgtggcctacaggctcctggagggtgagggtctgcccttccgctgcgccccggacagcctggaggtgagcacgcgctgggccctggaccgcgagcagcgggagaagtacgagctggtggccgtgtgcaccgtgcacgccggcgcgcgcgaggaggtggtgatggtgcccttcccggtgaccgtgtacgacgaggacgactcggcgcccaccttccccgcgggcgtcgacaccgccagcgccgtggtggagttcaagcggaaggaggacaccgtggtggccacgctgcgtgtcttcgatgcagacgtggtacctgcatcaggggagctggtgaggcggtacacaagcacgctgctccccggggacacctgggcccagcagaccttccgggtggaacactggcccaacgagacctcggtccaggccaacggcagcttcgtgcgggcgaccgtacatgactataggctggttctcaaccggaacctctccatctcggagaaccgcaccatgcagctggcggtgctggtcaatgactcagacttccagggcccaggagcgggcgtcctcttgctccacttcaacgtgtcggtgctgccggtcagcctgcacctgcccagtacctactccctctccgtgagcaggagggctcgccgatttgcccagatcgggaaagtctgtgtggaaaactgccaggcattcagtggcatcaacgtccagtacaagctgcattcctctggtgccaactgcagcacgctaggggtggtcacctcagccgaggacacctcggggatcctgtttgtgaatgacaccaaggccctgcggcggcccaagtgtgccgaacttcactacatggtggtggccaccgaccagcagacctctaggcaggcccaggcccagctgcttgtaacagtggaggggtcatatgtggccgaggaggcgggctgccccctgtcctgtgcagtcagcaagagacggctggagtgtgaggagtgtggcggcctgggctccccaacaggcaggtgtgagtggaggcaaggagatggcaaagggatcaccaggaacttctccacctgctctcccagcaccaagacctgccccgacggccactgcgatgttgtggagacccaagacatcaacatttgccctcaggactgcctccggggcagcattgttgggggacacgagcctggggagccccgggggattaaagctggctatggcacctgcaactgcttccctgaggaggagaagtgcttctgcgagcccgaagacatccaggatccactgtgcgacgagctgtgccgcacggtgatcgcagccgctgtcctcttctccttcatcgtctcggtgctgctgtctgccttctgcatccactgctaccacaagtttgcccacaagccacccatctcctcagctgagatgaccttccggaggcccgcccaggccttcccggtcagctactcctcttccggtgcccgccggccctcgctggactccatggagaaccaggtctccgtggatgccttcaagatcctggaggatccaaagtgggaattccctcggaagaacttggttcttggaaaaactctaggagaaggcgaatttggaaaagtggtcaaggcaacggccttccatctgaaaggcagagcagggtacaccacggtggccgtgaagatgctgaaagagaacgcctccccgagtgagctgcgagacctgctgtcagagttcaacgtcctgaagcaggtcaaccacccacatgtcatcaaattgtatggggcctgcagccaggatggcccgctcctcctcatcgtggagtacgccaaatacggctccctgcggggcttcctccgcgagagccgcaaagtggggcctggctacctgggcagtggaggcagccgcaactccagctccctggaccacccggatgagcgggccctcaccatgggcgacctcatctcatttgcctggcagatctcacaggggatgcagtatctggccgagatgaagctcgttcatcgggacttggcagccagaaacatcctggtagctgaggggcggaagatgaagatttcggatttcggcttgtcccgagatgtttatgaagaggattcctacgtgaagaggagccagggtcggattccagttaaatggatggcaattgaatccctttttgatcatatctacaccacgcaaagtgatgtatggtcttttggtgtcctgctgtgggagatcgtgaccctagggggaaacccctatcctgggattcctcctgagcggctcttcaaccttctgaagaccggccaccggatggagaggccagacaactgcagcgaggagatgtactgcctgatgctgcaatgctggaagcaggagccggacaaaaggccggtgtttgcggacatcagcaaagacctggagaagatgatggttaagaggagagactacttggaccttgcggcgtccactccatctgactccctgatttatgacgacggcctctcagaggaggagacaccgctggtggactgtaataatgcccccctccctcgagccctcccttccacatggattgaaaacaaactctatggcatgtcagacccgaactggcctggagagagtcctgtaccactcacgagagctgatggcactaacactgggtttccaagatatccaaatgatagtgtatatgctaactggatgctttcaccctcagcggcaaaattaatggacacgtttgatagttaa

SEQ ID NO: 749 - DNA, 4203 bp, Homo sapiens
atggagctcctcccgccgctgcctcagtccttcctgttgctgctgctgttgcctgccaagcccgcggcgggcgaggactggcagtgcccgcgcaccccctacgcggcctctcgcgactttgacgtgaagtacgtggtgcccagcttctccgccggaggcctggtacaggccatggtgacctacgagggcgacagaaatgagagtgctgtgtttgtagccatacgcaatcgcctgcatgtgcttgggcctgacctgaagtctgtccagagcctggccacgggccctgctggagaccctggctgccagacgtgtgcagcctgtggcccaggaccccacggccctcccggtgacacagacacaaaggtgctggtgctggatcccgcgctgcctgcgctggtcagttgtggctccagcctgcagggccgctgcttcctgcatgacctagagccccaagggacagccgtgcatctggcagcgccagcctgcctcttctcagcccaccataaccggcccgatgactgccccgactgtgtggccagcccattgggcacccgtgtaactgtggttgagcaaggccaggcctcctatttctacgtggcatcctcactggacgcagccgtggctggcagcttcagcccacgctcagtgtctatcaggcgtctcaaggctgacgcctcgggattcgcaccgggctttgtggcgttgtcagtgctgcccaagcatcttgtctcctacagtattgaatacgtgcacagcttccacacgggagccttcgtatacttcctgactgtacagccggccagcgtgacagatgatcctagtgccctgcacacacgcctggcacggcttagcgccactgagccagagttgggtgactatcgggagctggtcctcgactgcagatttgctccaaaacgcaggcgccggggggccccagaaggcggacagccctaccctgtgctgcaggtggcccactccgctccagtgggtgcccaacttgccactgagctgagcatcgccgagggccaggaagtactatttggggtctttgtgactggcaaggatggtggtcctggcgtgggccccaactctgtcgtctgtgccttccccattgacctgctggacacactaattgatgagggtgtggagcgctgttgtgaatccccagtccatccaggcctccggcgaggcctcgacttcttccagtcgcccagtttttgccccaacccgcctggcctggaagccctcagccccaacaccagctgccgccacttccctctgctggtcagtagcagcttctcacgtgtggacctattcagtgggctgttgggaccagtacaggtcactgcattgtatgtgacacgccttgacaacgtcacagtggcacacatgggcacaatggatgggcgtatcctgcaggtggagctggtcaggtcactaaactacttgctgtatgtgtccaacttctcactgggtgacagtgggcagcccgtgcagcgggatgtcagtcgtcttggggaccacctactctttgcctctggggaccaggttttccaggtacctatccgaggccctggctgccgccacttcctgacctgtgggcgttgcctaagggcatggcatttcatgggctgtggctggtgtgggaacatgtgcggccagcagaaggagtgtcctggctcctggcaacaggaccactgcccacctaagcttactgagttccacccccacagtggacctctaaggggcagtacaaggctgaccctgtgtggctccaacttctaccttcacccttctggtctggtgcctgagggaacccatcaggtcactgtgggccaaagtccctgccggccactgcccaaggacagctcaaaactcagaccagtgccccggaaagactttgtagaggagtttgagtgtgaactggagcccttgggcacccaggcagtggggcctaccaacgtcagcctcaccgtgactaacatgccaccgggcaagcacttccgggtagacggcacctccgtgctgagaggcttctctttcatggagccagtgctgatagcagtgcaacccctctttggcccacgggcaggaggcacctgtctcactcttgaaggccagagtctgtctgtaggcaccagccgggctgtgctggtcaatgggactgagtgtctgctagcacgggtcagtgaggggcagcttttatgtgccacaccccctggggccacggtggccagtgtcccccttagcctgcaggtggggggtgcccaggtacctggttcctggaccttccagtacagagaagaccctgtcgtgctaagcatcagccccaactgtggctacatcaactcccacatcaccatctgtggccagcatctaacttcagcatggcacttagtgctgtcattccatgacgggcttagggcagtggaaagcaggtgtgagaggcagcttccagagcagcagctgtgccgccttcctgaatatgtggtccgagacccccagggatgggtggcagggaatctgagtgcccgaggggatggagctgctggctttacactgcctggctttcgcttcctacccccaccccatccacccagtgccaacctagttccactgaagcctgaggagcatgccattaagtttgagtatattgggctgggcgctgtggctgactgtgtgggtatcaacgtgaccgtgggtggtgagagctgccagcacgagttccggggggacatggttgtctgccccctgcccccatccctgcagcttggccaggatggtgccccattgcaggtctgcgtagatggtgaatgtcatatcctgggtagagtggtgcggccagggccagatggggtcccacagagcacgctccttggtatcctgctgcctttgctgctgcttgtggctgcactggcgactgcactggtcttcagctactggtggcggaggaagcagctagttcttcctcccaacctgaatgacctggcatccctggaccagactgctggagccacacccctgcctattctgtactcgggctctgactacagaagtggccttgcactccctgccattgatggtctggattccaccacttgtgtccatggagcatccttctccgatagtgaagatgaatcctgtgtgccactgctgcggaaagagtccatccagctaagggacctggactctgcgctcttggctgaggtcaaggatgtgctgattccccatgagcgggtggtcacccacagtgaccgagtcattggcaaaggccactttggagttgtctaccacggagaatacatagaccaggcccagaatcgaatccaatgtgccatcaagtcactaagtcgcatcacagagatgcagcaggtggaggccttcctgcgagaggggctgctcatgcgtggcctgaaccacccgaatgtgctggctctcattggtatcatgttgccacctgagggcctgccccatgtgctgctgccctatatgtgccacggtgacctgctccagttcatccgctcacctcagcggaaccccaccgtgaaggacctcatcagctttggcctgcaggtagcccgcggcatggagtacctggcagagcagaagtttgtgcacagggacctggctgcgcggaactgcatgctggacgagtcattcacagtcaaggtggctgactttggtttggcccgcgacatcctggacagggagtactatagtgttcaacagcatcgccacgctcgcctacctgtgaagtggatggcgctggagagcctgcagacctatagatttaccaccaagtctgatgtgtggtcatttggtgtgctgctgtgggaactgctgacacggggtgccccaccataccgccacattgacccttttgaccttacccacttcctggcccagggtcggcgcctgccccagcctgagtattgccctgattctctgtaccaagtgatgcagcaatgctgggaggcagacccagcagtgcgacccaccttcagagtactagtgggggaggtggagcagatagtgtctgcactgcttggggaccattatgtgcagctgccagcaacctacatgaacttgggccccagcacctcgcatgagatgaatgtgcgtccagaacagccgcagttctcacccatgccagggaatgtacgccggccccggccactctcagagcctcctcggcccacttga

SEQ ID NO: 750 - DNA, 4074 bp, Homo sapiens
atggagctcctcccgccgctgcctcagtccttcctgttgctgctgctgttgcctgccaagcccgcggcgggcgaggactggcagtgcccgcgcaccccctacgcggcctctcgcgactttgacgtgaagtacgtggtgcccagcttctccgccggaggcctggtacaggccatggtgacctacgagggcgacagaaatgagagtgctgtgtttgtagccatacgcaatcgcctgcatgtgcttgggcctgacctgaagtctgtccagagcctggccacgggccctgctggagaccctggctgccagacgtgtgcagcctgtggcccaggaccccacggccctcccggtgacacagacacaaaggtgctggtgctggatcccgcgctgcctgcgctggtcagttgtggctccagcctgcagggccgctgcttcctgcatgacctagagccccaagggacagccgtgcatctggcagcgccagcctgcctcttctcagcccaccataaccggcccgatgactgccccgactgtgtggccagcccattgggcacccgtgtaactgtggttgagcaaggccaggcctcctatttctacgtggcatcctcactggacgcagccgtggctggcagcttcagcccacgctcagtgtctatcaggcgtctcaaggctgacgcctcgggattcgcaccgggctttgtggcgttgtcagtgctgcccaagcatcttgtctcctacagtattgaatacgtgcacagcttccacacgggagccttcgtatacttcctgactgtacagccggccagcgtgacagatgatcctagtgccctgcacacacgcctggcacggcttagcgccactgagccagagttgggtgactatcgggagctggtcctcgactgcagatttgctccaaaacgcaggcgccggggggccccagaaggcggacagccctaccctgtgctgcaggtggcccactccgctccagtgggtgcccaacttgccactgagctgagcatcgccgagggccaggaagtactatttggggtctttgtgactggcaaggatggtggtcctggcgtgggccccaactctgtcgtctgtgccttccccattgacctgctggacacactaattgatgagggtgtggagcgctgttgtgaatccccagtccatccaggcctccggcgaggcctcgacttcttccagtcgcccagtttttgccccaacccgcctggcctggaagccctcagccccaacaccagctgccgccacttccctctgctggtcagtagcagcttctcacgtgtggacctattcaatgggctgttgggaccagtacaggtcactgcattgtatgtgacacgccttgacaacgtcacagtggcacacatgggcacaatggatgggcgtatcctgcaggttttccaggtacctatccgaggccctggctgccgccacttcctgacctgtgggcgttgcctaagggcatggcatttcatgggctgtggctggtgtgggaacatgtgcggccagcagaaggagtgtcctggctcctggcaacaggaccactgcccacctaagcttactgagttccacccccacagtggacctctaaggggcagtacaaggctgaccctgtgtggctccaacttctaccttcacccttctggtctggtgcctgagggaacccatcaggtcactgtgggccaaagtccctgccggccactgcccaaggacagctcaaaactcagaccagtgccccggaaagactttgtagaggagtttgagtgtgaactggagcccttgggcacccaggcagtggggcctaccaacgtcagcctcaccgtgactaacatgccaccgggcaagcacttccgggtagacggcacctccgtgctgagaggcttctctttcatggagccagtgctgatagcagtgcaacccctctttggcccacgggcaggaggcacctgtctcactcttgaaggccagagtctgtctgtaggcaccagccgggctgtgctggtcaatgggactgagtgtctgctagcacgggtcagtgaggggcagcttttatgtgccacaccccctggggccacggtggccagtgtcccccttagcctgcaggtggggggtgcccaggtacctggttcctggaccttccagtacagagaagaccctgtcgtgctaagcatcagccccaactgtggctacatcaactcccacatcaccatctgtggccagcatctaacttcagcatggcacttagtgctgtcattccatgacgggcttagggcagtggaaagcaggtgtgagaggcagcttccagagcagcagctgtgccgccttcctgaatatgtggtccgagacccccagggatgggtggcagggaatctgagtgcccgaggggatggagctgctggctttacactgcctggctttcgcttcctacccccaccccatccacccagtgccaacctagttccactgaagcctgaggagcatgccattaagtttgagtatattgggctgggcgctgtggctgactgtgtgggtatcaacgtgaccgtgggtggtgagagctgccagcacgagttccggggggacatggttgtctgccccctgcccccatccctgcagcttggccaggatggtgccccattgcaggtctgcgtagatggtgaatgtcatatcctgggtagagtggtgcggccagggccagatggggtcccacagagcacgctccttggtatcctgctgcctttgctgctgcttgtggctgcactggcgactgcactggtcttcagctactggtggcggaggaagcagctagttcttcctcccaacctgaatgacctggcatccctggaccagactgctggagccacacccctgcctattctgtactcgggctctgactacagaagtggccttgcactccctgccattgatggtctggattccaccacttgtgtccatggagcatccttctccgatagtgaagatgaatcctgtgtgccactgctgcggaaagagtccatccagctaagggacctggactctgcgctcttggctgaggtcaaggatgtgctgattccccatgagcgggtggtcacccacagtgaccgagtcattggcaaaggccactttggagttgtctaccacggagaatacatagaccaggcccagaatcgaatccaatgtgccatcaagtcactaagtcgcatcacagagatgcagcaggtggaggccttcctgcgagaggggctgctcatgcgtggcctgaaccacccgaatgtgctggctctcattggtatcatgttgccacctgagggcctgccccatgtgctgctgccctatatgtgccacggtgacctgctccagttcatccgctcacctcagcggaaccccaccgtgaaggacctcatcagctttggcctgcaggtagcccgcggcatggagtacctggcagagcagaagtttgtgcacagggacctggctgcgcggaactgcatgctggacgagtcattcacagtcaaggtggctgactttggtttggcccgcgacatcctggacagggagtactatagtgttcaacagcatcgccacgctcgcctacctgtgaagtggatggcgctggagagcctgcagacctatagatttaccaccaagtctgatgtgtggtcatttggtgtgctgctgtgggaactgctgacacggggtgccccaccataccgccacattgacccttttgaccttacccacttcctggcccagggtcggcgcctgccccagcctgagtattgccctgattctctgtaccaagtgatgcagcaatgctgggaggcagacccagcagtgcgacccaccttcagagtactagtgggggaggtggagcagatagtgtctgcactgcttggggaccattatgtgcagctgccagcaacctacatgaacttgggccccagcacctcgcatgagatgaatgtgcgtccagaacagccgcagttctcacccatgccagggaatgtacgccggccccggccactctcagagcctcctcggcccacttga

SEQ ID NO: 751 - DNA, 4203 bp, Homo sapiens
atggagctcctcccgccgctgcctcagtccttcctgttgctgctgctgttgcctgccaagcccgcggcgggcgaggactggcagtgcccgcgcaccccctacgcggcctctcgcgactttgacgtgaagtacgtggtgcccagcttctccgccggaggcctggtacaggccatggtgacctacgagggcgacagaaatgagagtgctgtgtttgtagccatacgcaatcgcctgcatgtgcttgggcctgacctgaagtctgtccagagcctggccacgggccctgctggagaccctggctgccagacgtgtgcagcctgtggcccaggaccccacggccctcccggtgacacagacacaaaggtgctggtgctggatcccgcgctgcctgcgctggtcagttgtggctccagcctgcagggccgctgcttcctgcatgacctagagccccaagggacagccgtgcatctggcagcgccagcctgcctcttctcagcccaccataaccggcccgatgactgccccgactgtgtggccagcccattgggcacccgtgtaactgtggttgagcaaggccaggcctcctatttctacgtggcatcctcactggacgcagccgtggctggcagcttcagcccacgctcagtgtctatcaggcgtctcaaggctgacgcctcgggattcgcaccgggctttgtggcgttgtcagtgctgcccaagcatcttgtctcctacagtattgaatacgtgcacagcttccacacgggagccttcgtatacttcctgactgtacagccggccagcgtgacagatgatcctagtgccctgcacacacgcctggcacggcttagcgccactgagccagagttgggtgactatcgggagctggtcctcgactgcagatttgctccaaaacgcaggcgccggggggccccagaaggcggacagccctaccctgtgctgcaggtggcccactccgctccagtgggtgcccaacttgccactgagctgagcatcgccgagggccaggaagtactatttggggtctttgtgactggcaaggatggtggtcctggcgtgggccccaactctgtcgtctgtgccttccccattgacctgctggacacactaattgatgagggtgtggagcgctgttgtgaatccccagtccatccaggcctccggcgaggcctcgacttcttccagtcgcccagtttttgccccaacccgcctggcctggaagccctcagccccaacaccagctgccgccacttccctctgctggtcagtagcagcttctcacgtgtggacctattcaatgggctgttgggaccagtacaggtcactgcattgtatgtgacacgccttgacaacgtcacagtggcacacatgggcacaatggatgggcgtatcctgcaggtggagctggtcaggtcactaaactacttgctgtatgtgtccaacttctcactgggtgacagtgggcagcccgtgcagcgggatgtcagtcgtcttggggaccacctactctttgcctctggggaccaggttttccaggtacctatccaaggccctggctgccgccacttcctgacctgtgggcgttgcctaagggcatggcatttcatgggctgtggctggtgtgggaacatgtgcggccagcagaaggagtgtcctggctcctggcaacaggaccactgcccacctaagcttactgagttccacccccacagtggacctctaaggggcagtacaaggctgaccctgtgtggctccaacttctaccttcacccttctggtctggtgcctgagggaacccatcaggtcactgtgggccaaagtccctgccggccactgcccaaggacagctcaaaactcagaccagtgccccggaaagactttgtagaggagtttgagtgtgaactggagcccttgggcacccaggcagtggggcctaccaacgtcagcctcaccgtgactaacatgccaccgggcaagcacttccgggtagacggcacctccgtgctgagaggcttctctttcatggagccagtgctgatagcagtgcaacccctctttggcccacgggcaggaggcacctgtctcactcttgaaggccagagtctgtctgtaggcaccagccgggctgtgctggtcaatgggactgagtgtctgctagcacgggtcagtgaggggcagcttttatgtgccacaccccctggggccacggtggccagtgtcccccttagcctgcaggtggggggtgcccaggtacctggttcctggaccttccagtacagagaagaccctgtcgtgctaagcatcagccccaactgtggctacatcaactcccacatcaccatctgtggccagcatctaacttcagcatggcacttagtgctgtcattccatgacgggcttagggcagtggaaagcaggtgtgagaggcagcttccagagcagcagctgtgccgccttcctgaatatgtggtccgagacccccagggatgggtggcagggaatctgagtgcccgaggggatggagctgctggctttacactgcctggctttcgcttcctacccccaccccatccacccagtgccaacctagttccactgaagcctgaggagcatgccattaagtttgagtatattgggctgggcgctgtggctgactgtgtgggtatcaacgtgaccgtgggtggtgagagctgccagcacgagttccggggggacatggttgtctgccccctgcccccatccctgcagcttggccaggatggtgccccattgcaggtctgcgtagatggtgaatgtcatatcctgggtagagtggtgcggccagggccagatggggtcccacagagcacgctccttggtatcctgctgcctttgctgctgcttgtggctgcactggcgactgcactggtcttcagctactggtggcggaggaagcagctagttcttcctcccaacctgaatgacctggcatccctggaccagactgctggagccacacccctgcctattctgtactcgggctctgactacagaagtggccttgcactccctgccattgatggtctggattccaccacttgtgtccatggagcatccttctccgatagtgaagatgaatcctgtgtgccactgctgcggaaagagtccatccagctaagggacctggactctgcgctcttggctgaggtcaaggatgtgctgattccccatgagcgggtggtcacccacagtgaccgagtcattggcaaaggccactttggagttgtctaccacggagaatacatagaccaggcccagaatcgaatccaatgtgccatcaagtcactaagtcgcatcacagagatgcagcaggtggaggccttcctgcgagaggggctgctcatgcgtggcctgaaccacccgaatgtgctggctctcattggtatcatgttgccacctgagggcctgccccatgtgctgctgccctatatgtgccacggtgacctgctccagttcatccgctcacctcagcggaaccccaccgtgaaggacctcatcagctttggcctgcaggtagcccgcggcatggagtacctggcagagcagaagtttgtgcacagggacctggctgcgcggaactgcatgctggacgagtcattcacagtcaaggtggctgactttggtttggcccgcgacatcctggacagggagtactatagtgttcaacagcatcgccacgctcgcctacctgtgaagtggatggcgctggagagcctgcagacctatagatttaccaccaagtctgatgtgtggtcatttggtgtgctgctgtgggaactgctgacacggggtgccccaccataccgccacattgacccttttgaccttacccacttcctggcccagggtcggcgcctgccccagcctgagtattgccctgattctctgtaccaagtgatgcagcaatgctgggaggcagacccagcagtgcgacccaccttcagagtactagtgggggaggtggagcagatagtgtctgcactgcttggggaccattatgtgcagctgccagcaacctacatgaacttgggccccagcacctcgcatgagatgaatgtgcgtccagaacagccgcagttctcacccatgccagggaatgtacgccggccccggccactctcagagcctcctcggcccacttga

SEQ ID NO: 752 - DNA, 4036 bp, Homo sapiens
atggagctcctcccgccgctgcctcagtccttcctgttgctgctgctgttgcctgccaagcccgcggcgggcgaggactggcagtgcccgcgcaccccctacgcggcctctcgcgactttgacgtgaagtacgtggtgcccagcttctccgccggaggcctggtacaggccatggtgacctacgagggcgacagaaatgagagtgctgtgtttgtagccatacgcaatcgcctgcatgtgcttgggcctgacctgaagtctgtccagagcctggccacgggccctgctggagaccctggctgccagacgtgtgcagcctgtggcccaggaccccacggccctcccggtgacacagacacaaaggtgctggtgctggatcccgcgctgcctgcgctggtcagttgtggctccagcctgcagggccgctgcttcctgcatgacctagagccccaagggacagccgtgcatctggcagcgccagcctgcctcttctcagcccaccataaccggcccgatgactgccccgactgtgtggccagcccattgggcacccgtgtaactgtggttgagcaaggccaggcctcctatttctacgtggcatcctcactggacgcagccgtggctggcagcttcagcccacgctcagtgtctatcaggcgtctcaaggctgacgcctcgggattcgcaccgggctttgtggcgttgtcagtgctgcccaagcatcttgtctcctacagtattgaatacgtgcacagcttccacacgggagccttcgtatacttcctgactgtacagccggccagcgtgacagatgatcctagtgccctgcacacacgcctggcacggcttagcgccactgagccagagttgggtgactatcgggagctggtcctcgactgcagatttgctccaaaacgcaggcgccggggggccccagaaggcggacagccctaccctgtgctgcaggtggcccactccgctccagtgggtgcccaacttgccactgagctgagcatcgccgagggccaggaagtactatttggggtctttgtgactggcaaggatggtggtcctggcgtgggccccaactctgtcgtctgtgccttccccattgacctgctggacacactaattgatgagggtgtggagcgctgttgtgaatccccagtccatccaggcctccggcgaggcctcgacttcttccagtcgcccagtttttgccccaacccgcctggcctggaagccctcagccccaacaccagctgccgccacttccctctgctggtcagtagcagcttctcacgtgtggacctattcaatgggctgttgggaccagtacaggtcactgcattgtatgtgacacgccttgacaacgtcacagtggcacacatgggcacaatggatgggcgtatcctgcaggtggagctggtcaggtcactaaactacttgctgtatgtgtccaacttctcactgggtgacagtgggcagcccgtgcagcgggatgtcagtcgtcttggggaccacctactctttgcctctggggaccaggttttccaggtacctatccgaggccctggctgccgccacttcctgacctgtgggcgttgcctaagggcatggcatttcatgggctgtggctggtgtgggaacatgtgcggccagcagaaggagtgtcctggctcctggcaacaggaccactgcccacctaagcttactgagttccacccccacagtggacctctaaggggcagtacaaggctgaccctgtgtggctccaacttctaccttcacccttctggtctggtgcctgagggaacccatcaggtcactgtgggccaaagtccctgccggccactgcccaaggacagctcaaaactcggagccagtgctgatagcagtgcaacccctctttggcccacgggcaggaggcacctgtctcactcttgaaggccagagtctgtctgtaggcaccagccgggctgtgctggtcaatgggactgagtgtctgctagcacgggtcagtgaggggcagcttttatgtgccacaccccctggggccacggtggccagtgtcccccttagcctgcaggtggggggtgcccaggtacctggttcctggaccttccagtacagagaagaccctgtcgtgctaagcatcagccccaactgtggctacatcaactcccacatcaccatctgtggccagcatctaacttcagcatggcacttagtgctgtcattccatgacgggcttagggcagtggaaagcaggtgtgagaggcagcttccagagcagcagctgtgccgccttcctgaatatgtggtccgagacccccagggatgggtggcagggaatctgagtgcccgaggggatggagctgctggctttacactgcctggctttcgcttcctacccccaccccatccacccagtgccaacctagttccactgaagcctgaggagcatgccattaagtttgagtatattgggctgggcgctgtggctgactgtgtgggtatcaacgtgaccgtgggtggtgagagctgccagcacgagttccggggggacatggttgtctgccccctgcccccatccctgcagcttggccaggatggtgccccattgcaggtctgcgtagatggtgaatgtcatatcctgggtagagtggtgcggccagggccagatggggtcccacagagcacgctccttggtatcctgctgcctttgctgctgcttgtggctgcactggcgactgcactggtcttcagctactggtggcggaggaagcagctagttcttcctcccaacctgaatgacctggcatccctggaccagactgctggagccacacccctgcctattctgtactcgggctctgactacagaagtggccttgcactccctgccattgatggtctggattccaccacttgtgtccatggagcatccttctccgatagtgaagatgaatcctgtgtgccactgctgcggaaagagtccatccagctaagggacctggactctgcgctcttggctgaggtcaaggatgtgctgattccccatgagcgggtggtcacccacagtgaccgagtcattggcaaaggccactttggagttgtctaccacggagaatacatagaccaggcccagaatcgaatccaatgtgccatcaagtcactaagtcgcatcacagagatgcagcaggtggaggccttcctgcgagaggggctgctcatgcgtggcctgaaccacccgaatgtgctggctctcattggtatcatgttgccacctgagggcctgccccatgtgctgctgccctatatgtgccacggtgacctgctccagttcatccgctcacctcagcggaaccccaccgtgaaggacctcatcagctttggcctgcaggtagcccgcggcatggagtacctggcagagcagaagtttgtgcacagggacctggctgcgcggaactgcatgctggacgagtcattcacagtcaaggtggctgactttggtttggcccgcgacatcctggacagggagtactatagtgttcaacagcatcgccacgctcgcctacctgtgaagtggatggcgctggagagcctgcagacctatagatttaccaccaagtctgatgtgtggtcatttggtgtgctgctgtgggaactgctgacacggggtgccccaccataccgccacattgacccttttgaccttacccacttcctggcccagggtcggcgcctgccccagcctgagtattgccctgattctctgtaccaagtgatgcagcaatgctgggaggcagacccagcagtgcgacccaccttcagagtactagtgggggaggtggagcagatagtgtctgcactgcttggggaccattatgtgcagctgccagcaacctacatgaacttgggccccagcacctcgcatgagatgaatgtgcgtccagaacagccgcagttctcacccatgccagggaatgtacgccggccccggccactctcagagcctcctcggcccacttga

SEQ ID NO: 753 - DNA, 4206 bp, Homo sapiens
atggagctcctcccgccgctgcctcagtccttcctgttgctgctgctgttgcctgccaagcccgcggcgggcgaggactggcagtgcccgcgcaccccctacgcggcctctcgcgactttgacgtgaagtacgtggtgcccagcttctccgccggaggcctggtacaggccatggtgacctacgagggcgacagaaatgagagtgctgtgtttgtagccatacgcaatcgcctgcatgtgcttgggcctgacctgaagtctgtccagagcctggccacgggccctgctggagaccctggctgccagacgtgtgcagcctgtggcccaggaccccacggccctcccggtgacacagacacaaaggtgctggtgctggatcccgcgctgcctgcgctggtcagttgtggctccagcctgcagggccgctgcttcctgcatgacctagagccccaagggacagccgtgcatctggcagcgccagcctgcctcttctcagcccaccataaccggcccgatgactgccccgactgtgtggccagcccattgggcacccgtgtaactgtggttgagcaaggccaggcctcctatttctacgtggcatcctcactggacgcagccgtggctggcagcttcagcccacgctcagtgtctatcaggcgtctcaaggctgacgcctcgggattcgcaccgggctttgtggcgttgtcagtgctgcccaagcatcttgtctcctacagtattgaatacgtgcacagcttccacacgggagccttcgtatacttcctgactgtacagccggccagcgtgacagatgatcctagtgccctgcacacacgcctggcacggcttagcgccactgagccagagttgggtgactatcgggagctggtcctcgactgcagatttgctccaaaacgcaggcgccggggggccccagaaggcggacagccctaccctgtgctgcaggtggcccactccgctccagtgggtgcccaacttgccactgagctgagcatcgccgagggccaggaagtactatttggggtctttgtgactggcaaggatggtggtcctggcgtgggccccaactctgtcgtctgtgccttccccattgacctgctggacacactaattgatgagggtgtggagcgctgttgtgaatccccagtccatccaggcctccggcgaggcctcgacttcttccagtcgcccagtttttgccccaacccgcctggcctggaagccctcagccccaacaccagctgccgccacttccctctgctggtcagtagcagcttctcacgtgtggacctattcaatgggctgttgggaccagtacaggtcactgcattgtatgtgacacgccttgacaacgtcacagtggcacacatgggcacaatggatgggcgtatcctgcaggtggagctggtcaggtcactaaactacttgctgtatgtgtccaacttctcactgggtgacagtgggcagcccgtgcagcgggatgtcagtcgtcttggggaccacctactctttgcctctggggaccaggttttccaggtacctatccgaggccctggctgccgccacttcctgacctgtgggcgttgcctaagggcatggcatttcatgggctgtggctggtgtgggaacatgtgcggccagcagaaggagtgtcctggctcctggcaacaggaccactgcccacctaagcttactgagttccacccccacagtggacctctaaggggcagtacaaggctgaccctgtgtggctccaacttctaccttcacccttctggtctggtgcctgagggaacccatcaggtcactgtgggccaaagtccctgccggccactgcccaaggacagctcaaaactcagaccagtgccccggaaagactttgtagaggagtttgagtgtgaactggagcccttgggcacccaggcagtggggcctaccaacgtcagcctcaccgtgactaacatgccaccgggcaagcacttccgggtagacggcacctccgtgctgagaggcttctctttcatggagccagtgctgatagcagtgcaacccctctttggcccacgggcaggaggcacctgtctcactcttgaaggccagagtctgtctgtaggcaccagccgggctgtgctggtcaatgggactgagtgtctgctagcacgggtcagtgaggggcagcttttatgtgccacaccccctggggccacggtggccagtgtcccccttagcctgcaggtggggggtgcccaggtacctggttcctggaccttccagtacagagaagaccctgtcgtgctaagcatcagccccaactgtggctacatcaactcccacatcaccatctgtggccagcatctaacttcagcatggcacttagtgctgtcattccatgacgggcttagggcagtggaaagcaggcagtgtgagaggcagcttccagagcagcagctgtgccgccttcctgaatatgtggtccgagacccccagggatgggtggcagggaatctgagtgcccgaggggatggagctgctggctttacactgcctggctttcgcttcctacccccaccccatccacccagtgccaacctagttccactgaagcctgaggagcatgccattaagtttgagtatattgggctgggcgctgtggctgactgtgtgggtatcaacgtgaccgtgggtggtgagagctgccagcacgagttccggggggacatggttgtctgccccctgcccccatccctgcagcttggccaggatggtgccccattgcaggtctgcgtagatggtgaatgtcatatcctgggtagagtggtgcggccagggccagatggggtcccacagagcacgctccttggtatcctgctgcctttgctgctgcttgtggctgcactggcgactgcactggtcttcagctactggtggcggaggaagcagctagttcttcctcccaacctgaatgacctggcatccctggaccagactgctggagccacacccctgcctattctgtactcgggctctgactacagaagtggccttgcactccctgccattgatggtctggattccaccacttgtgtccatggagcatccttctccgatagtgaagatgaatcctgtgtgccactgctgcggaaagagtccatccagctaagggacctggactctgcgctcttggctgaggtcaaggatgtgctgattccccatgagcgggtggtcacccacagtgaccgagtcattggcaaaggccactttggagttgtctaccacggagaatacatagaccaggcccagaatcgaatccaatgtgccatcaagtcactaagtcgcatcacagagatgcagcaggtggaggccttcctgcgagaggggctgctcatgcgtggcctgaaccacccgaatgtgctggctctcattggtatcatgttgccacctgagggcctgccccatgtgctgctgccctatatgtgccacggtgacctgctccagttcatccgctcacctcagcggaaccccaccgtgaaggacctcatcagctttggcctgcaggtagcccgcggcatggagtacctggcagagcagaagtttgtgcacagggacctggctgcgcggaactgcatgctggacgagtcattcacagtcaaggtggctgactttggtttggcccgcgacatcctggacagggagtactatagtgttcaacagcatcgccacgctcgcctacctgtgaagtggatggcgctggagagcctgcagacctatagatttaccaccaagtctgatgtgtggtcatttggtgtgctgctgtgggaactgctgacacggggtgccccaccataccgccacattgacccttttgaccttacccacttcctggcccagggtcggcgcctgccccagcctgagtattgccctgattctctgtaccaagtgatgcagcaatgctgggaggcagacccagcagtgcgacccaccttcagagtactagtgggggaggtggagcagatagtgtctgcactgcttggggaccattatgtgcagctgccagcaacctacatgaacttgggccccagcacctcgcatgagatgaatgtgcgtccagaacagccgcagttctcacccatgccagggaatgtacgccggccccggccactctcagagcctcctcggcccacttga

SEQ ID NO: 754 - DNA, 4056 bp, Homo sapiens
atggagctcctcccgccgctgcctcagtccttcctgttgctgctgctgttgcctgccaagcccgcggcgggcgaggactggcagtgcccgcgcaccccctacgcggcctctcgcgactttgacgtgaagtacgtggtgcccagcttctccgccggaggcctggtacaggccatggtgacctacgagggcgacagaaatgagagtgctgtgtttgtagccatacgcaatcgcctgcatgtgcttgggcctgacctgaagtctgtccagagcctggccacgggccctgctggagaccctggctgccagacgtgtgcagcctgtggcccaggaccccacggccctcccggtgacacagacacaaaggtgctggtgctggatcccgcgctgcctgcgctggtcagttgtggctccagcctgcagggccgctgcttcctgcatgacctagagccccaagggacagccgtgcatctggcagcgccagcctgcctcttctcagcccaccataaccggcccgatgactgccccgactgtgtggccagcccattgggcacccgtgtaactgtggttgagcaaggccaggcctcctatttctacgtggcatcctcactggacgcagccgtggctggcagcttcagcccacgctcagtgtctatcaggcgtctcaaggctgacgcctcgggattcgcaccgggctttgtggcgttgtcagtgctgcccaagcatcttgtctcctacagtattgaatacgtgcacagcttccacacgggagccttcgtatacttcctgactgtacagccggccagcgtgacagatgatcctagtgccctgcacacacgcctggcacggcttagcgccactgagccagagttgggtgactatcgggagctggtcctcgactgcagatttgctccaaaacgcaggcgccggggggccccagaaggcggacagccctaccctgtgctgcaggtggcccactccgctccagtgggtgcccaacttgccactgagctgagcatcgccgagggccaggaagtactatttggggtctttgtgactggcaaggatggtggtcctggcgtgggccccaactctgtcgtctgtgccttccccattgacctgctggacacactaattgatgagggtgtggagcgctgttgtgaatccccagtccatccaggcctccggcgaggcctcgacttcttccagtcgcccagtttttgccccaacccgcctggcctggaagccctcagccccaacaccagctgccgccacttccctctgctggtcagtagcagcttctcacgtgtggacctattcaatgggctgttgggaccagtacaggtcactgcattgtatgtgacacgccttgacaacgtcacagtggcacacatgggcacaatggatgggcgtatcctgcaggtggagctggtcaggtcactaaactacttgctgtatgtgtccaacttctcactgggtgacagtgggcagcccgtgcagcgggatgtcagtcgtcttggggaccacctactctttgcctctggggaccaggttttccaggtacctatccgaggccctggctgccgccacttcctgacctgtgggcgttgcctaagggcatggcatttcatgggctgtggctggtgtgggaacatgtgcggccagcagaaggagtgtcctggctcctggcaacaggaccactgcccacctaagcttactgagttccacccccacagtggacctctaaggggcagtacaaggctgaccctgtgtggctccaacttctaccttcacccttctggtctggtgcctgagggaacccatcaggtcactgtgggccaaagtccctgccggccactgcccaaggacagctcaaaactcagaccagtgccccggaaagactttgtagaggagtttgagtgtgaactggagcccttgggcacccaggcagtggggcctaccaacgtcagcctcaccgtgactaacatgccaccgggcaagcacttccgggtagacggcacctccgtgctgagaggcttctctttcatggagccagtgctgatagcagtgcaacccctctttggcccacgggcaggaggcacctgtctcactcttgaaggccagagtctgtctgtaggcaccagccgggctgtgctggtcaatgggactgagtgtctgctagcacgggtcagtgaggggcagcttttatgtgccacaccccctggggccacggtggccagtgtcccccttagcctgcaggtggggggtgcccaggtacctggttcctggaccttccagtacagagaagaccctgtcgtgctaagcatcagccccaactgtggctacatcaactcccacatcaccatctgtggccagcatctaacttcagcatggcacttagtgctgtcattccatgacgggcttagggcagtggaaagcaggtgtgagaggcagcttccagagcagcagctgtgccgccttcctgaatatgtggtccgagacccccagggatgggtggcagggaatctgagtgcccgaggggatggagctgctggctttacactgcctggctttcgcttcctacccccaccccatccacccagtgccaacctagttccactgaagcctgaggagcatgccattaagtttgaggtctgcgtagatggtgaatgtcatatcctgggtagagtggtgcggccagggccagatggggtcccacagagcacgctccttggtatcctgctgcctttgctgctgcttgtggctgcactggcgactgcactggtcttcagctactggtggcggaggaagcagctagttcttcctcccaacctgaatgacctggcatccctggaccagactgctggagccacacccctgcctattctgtactcgggctctgactacagaagtggccttgcactccctgccattgatggtctggattccaccacttgtgtccatggagcatccttctccgatagtgaagatgaatcctgtgtgccactgctgcggaaagagtccatccagctaagggacctggactctgcgctcttggctgaggtcaaggatgtgctgattccccatgagcgggtggtcacccacagtgaccgagtcattggcaaaggccactttggagttgtctaccacggagaatacatagaccaggcccagaatcgaatccaatgtgccatcaagtcactaagtcgcatcacagagatgcagcaggtggaggccttcctgcgagaggggctgctcatgcgtggcctgaaccacccgaatgtgctggctctcattggtatcatgttgccacctgagggcctgccccatgtgctgctgccctatatgtgccacggtgacctgctccagttcatccgctcacctcagcggaaccccaccgtgaaggacctcatcagctttggcctgcaggtagcccgcggcatggagtacctggcagagcagaagtttgtgcacagggacctggctgcgcggaactgcatgctggacgagtcattcacagtcaaggtggctgactttggtttggcccgcgacatcctggacagggagtactatagtgttcaacagcatcgccacgctcgcctacctgtgaagtggatggcgctggagagcctgcagacctatagatttaccaccaagtctgatgtgtggtcatttggtgtgctgctgtgggaactgctgacacggggtgccccaccataccgccacattgacccttttgaccttacccacttcctggcccagggtcggcgcctgccccagcctgagtattgccctgattctctgtaccaagtgatgcagcaatgctgggaggcagacccagcagtgcgacccaccttcagagtactagtgggggaggtggagcagatagtgtctgcactgcttggggaccattatgtgcagctgccagcaacctacatgaacttgggccccagcacctcgcatgagatgaatgtgcgtccagaacagccgcagttctcacccatgccagggaatgtacgccggccccggccactctcagagcctcctcggcccacttga

SEQ ID NO: 755 - DNA, 4203 bp, Homo sapiens
atggagctcctcccgccgctgcctcagtccttcctgttgctgctgctgttgcctgccaagcccgcggcgggcgaggactggcagtgcccgcgcaccccctacgcggcctctcgcgactttgacgtgaagtacgtggtgcccagcttctccgccggaggcctggtacaggccatggtgacctacgagggcgacagaaatgagagtgctgtgtttgtagccatacgcaatcgcctgcatgtgcttgggcctgacctgaagtctgtccagagcctggccacgggccctgctggagaccctggctgccagacgtgtgcagcctgtggcccaggaccccacggccctcccggtgacacagacacaaaggtgctggtgctggatcccgcgctgcctgcgctggtcagttgtggctccagcctgcagggccgctgcttcctgcatgacctagagccccaagggacagccgtgcatctggcagcgccagcctgcctcttctcagcccaccataaccggcccgatgactgccccgactgtgtggccagcccattgggcacccgtgtaactgtggttgagcaaggccaggcctcctatttctacgtggcatcctcactggacgcagccgtggctggcagcttcagcccacgctcagtgtctatcaggcgtctcaaggctgacgcctcgggattcgcaccgggctttgtggcgttgtcagtgctgcccaagcatcttgtctcctacagtattgaatacgtgcacagcttccacacgggagccttcgtatacttcctgactgtacagccggccagcgtgacagatgatcctagtgccctgcacacacgcctggcacggcttagcgccactgagccagagttgggtgactatcgggagctggtcctcgactgcagatttgctccaaaacgcaggcgccggggggccccagaaggcggacagccctaccctgtgctgcaggtggcccactccgctccagtgggtgcccaacttgccactgagctgagcatcgccgagggccaggaagtactatttggggtctttgtgactggcaaggatggtggtcctggcgtgggccccaactctgtcgtctgtgccttccccattgacctgctggacacactaattgatgagggtgtggagcgctgttgtgaatccccagtccatccaggcctccggcgaggcctcgacttcttccagtcgcccagtttttgccccaacccgcctggcctggaagccctcagccccaacaccagctgccgccacttccctctgctggtcagtagcagcttctcacgtgtggacctattcaatgggctgttgggaccagtacaggtcactgcattgtatgtgacacgccttgacaacgtcacagtggcacacatgggcacaatggatgggcgtatcctgcaggtggagctggtcaggtcactaaactacttgctgtatgtgtccaacttctcactgggtgacagtgggcagcccgtgcagcgggatgtcagtcgtcttggggaccacctactctttgcctctggggaccaggttttccaggtacctatccgaggccctggctgccgccacttcctgacctgtgggcgttgcctaagggcatggcatttcatgggctgtggctggtgtgggaacatgtgcggccagcagaaggagtgtcctggctcctggcaacaggaccactgcccacctaagcttactgagttccacccccacagtggacctctaaggggcagtacaaggctgaccctgtgtggctccaacttctaccttcacccttctggtctggtgcctgagggaacccatcaggtcactgtgggccaaagtccctgccggccactgcccaaggacagctcaaaactcagaccagtgccccggaaagactttgtagaggagtttgagtgtgaactggagcccttgggcacccaggcagtggggcctaccaacgtcagcctcaccgtgactaacatgccaccgggcaagcacttccgggtagacggcacctccgtgctgagaggcttctctttcatggagccagtgctgatagcagtgcaacccctctttggcccacgggcaggaggcacctgtctcactcttgaaggccagagtctgtctgtaggcaccagccgggctgtgctggtcaatgggactgagtgtctgctagcacgggtcagtgaggggcagcttttatgtgccacaccccctggggccacggtggccagtgtcccccttagcctgcaggtggggggtgcccaggtacctggttcctggaccttccagtacagagaagaccctgtcgtgctaagcatcagccccaactgtggctacatcaactcccacatcaccatctgtggccagcatctaacttcagcatggcacttagtgctgtcattccatgacgggcttagggcagtggaaagcaggtgtgagaggcagcttccagagcagcagctgtgccgccttcctgaatatgtggtccgagacccccagggatgggtggcagggaatctgagtgcccgaggggatggagctgctggctttacactgcctggctttcgcttcctacccccaccccatccacccagtgccaacctagttccactgaagcctgaggagcatgccattaagtttgagtatattgggctgggcgctgtggctgactgtgtgggtatcaacgtgaccgtgggtggtgagagctgccagcacgagttccggggggacatggttgtctgccccctgcccccatccctgcagcttggccaggatggtgccccattgcaggtctgcgtagatggtgaatgtcatatcctgggtagagtggtgcggccagggccagatggggtcccacagagcacgctccttggtatcctgctgcctttgctgctgcttgtggctgcactggcgactgcactggtcttcagctactggtggcggaggaagcagctagttcttcctcccaacctgaatgacctggcatccctggaccagactgctggagccacacccctgcctattctgtactcgggctctgactacagaagtggccttgcactccctgccattgatggtctggattccaccacttgtgtccatggagcatccttctccgatagtgaagatgaatcctgtgtgccactgctgcggaaagagtccatccagctaagggacctggactctgcgctcttggctgaggtcaaggatgtgctgattccccatgagcgggtggtcacccacagtgaccgagtcattggcaaaggccactttggagttgtctaccacggagaatacatagaccaggcccagaatcgaatccaatgtgccatcaagtcactaagtcgcatcacagagatgcagcaggtggaggccttcctgcgagaggggctgctcatgcgtggcctgaaccacccgaatgtgctggctctcattggtatcatgttgccacctgagggcctgccccatgtgctgctgccctatatgtgccacggtgacctgctccagttcatccgctcacctcagcggaaccccaccgtgaaggacctcatcagctttggcctgcaggtagcccgcggcatggagtacctggcagagcagaagtttgtgcacagggacctggctgcgcggaactgcatgctggacgagtcattcacagtcaaggtggctgactttggtttggcccgcgacatcctggacagggagtactatagtgttcaacagcatcgccacgctcgcctacctgtgaagtggatggcgctggagagcctgcagacctatagatttaccaccaagtctgatgtgtggtcatttggtgtgctgctgtgggaactgctgacacggggtgccccaccataccgccacattgacccttttgaccttacccacttcctggcccagggtcggcgcctgccccagcctgagtattgccctgattctctgtaccaagtgatgcagcaatgctgggaggcagacccagcagtgcgacccaccttcggagtactagtgggggaggtggagcagatagtgtctgcactgcttggggaccattatgtgcagctgccagcaacctacatgaacttgggccccagcacctcgcatgagatgaatgtgcgtccagaacagccgcagttctcacccatgccagggaatgtacgccggccccggccactctcagagcctcctcggcccacttga

SEQ ID NO: 756 - DNA, 2814 bp, Homo sapiens
atgcaccggccgcgccgccgcgggacgcgcccgccgctcctggcgctgctggccgcgctgctgctggccgcacgcggggctgctgcccaagaaacagagctgtcagtcagtgctgaattagtgcctacctcatcatggaacatctcaagtgaactcaacaaagattcttacctgacccttgatgaaccaatgaataacatcaccacgtctctgggccagacagcagaactgcactgcaaagtctctgggaatccacctcccaccatccgctggttcaaaaatgatgctcctgtggtccaggagccccggaggctctcctttcggtccaccatctatggctctcggctgcggattagaaacctcgacaccacagacacaggctacttccagtgcgtggcaacaaacggcaaggaggtggtttcttccactggagtcttgtttgtcaagtttggcccccctcccactgcaagtccaggatactcagatgagtatgaagaagatggattctgtcagccatacagagggattgcatgtgcaagatttattggcaaccgcaccgtctatatggagtctttgcacatgcaaggggaaatagaaaatcagatcacagctgccttcactatgattggcacttccagtcacttatctgataagtgttctcagttcgccattccttccctgtgccactatgccttcccgtactgcgatgaaacttcatccgtcccaaagccccgtgacttgtgtcgcgatgaatgtgaaatcctggagaatgtcctgtgtcaaacagagtacatttttgcaagatcaaatcccatgattctgatgaggctgaaactgccaaactgtgaagatctcccccagccagagagcccagaagctgcgaactgtatccggattggaattcccatggcagatcctataaataaaaatcacaagtgttataacagcacaggtgtggactaccgggggaccgtcagtgtgaccaaatcagggcgccagtgccagccatggaattcccagtatccccacacacacactttcaccgcccttcgtttcccagagctgaatggaggccattcctactgccgcaacccagggaatcaaaaggaagctccctggtgcttcaccttggatgaaaactttaagtctgatctgtgtgacatcccagcttgcgattcaaaggattccaaggagaagaataaaatggaaatcctgtacatactagtgccaagtgtggccattcccctggccattgctttactcttcttcttcatttgcgtctgtcggaataaccagaagtcatcgtcggcaccagtccagaggcaaccaaaacacgtcagaggtcaaaatgtggagatgtcaatgctgaatgcatataaacccaagagcaaggctaaagagctacctctttctgctgtacgctttatggaagaattgggtgagtgtgcctttggaaaaatctataaaggccatctctatctcccaggcatggaccatgctcagctggttgctatcaagaccttgaaagactataacaacccccagcaatggacggaatttcaacaagaagcctccctaatggcagaactgcaccaccccaatattgtctgccttctaggtgccgtcactcaggaacaacctgtgtgcatgctttttgagtatattaatcagggggatctccatgagttcctcatcatgagatccccacactctgatgttggctgcagcagtgatgaagatgggactgtgaaatccagcctggaccacggagattttctgcacattgcaattcagattgcagctggcatggaatacctgtctagtcacttctttgtccacaaggaccttgcagctcgcaatattttaatcggagagcaacttcatgtaaagatttcagacttggggctttccagagaaatttactccgctgattactacagggtccagagtaagtccttgctgcccattcgctggatgccccctgaagccatcatgtatggcaaattctcttctgattcagatatctggtcctttggggttgtcttgtgggagattttcagttttggactccagccatattatggattcagtaaccaggaagtgattgagatggtgagaaaacggcagctcttaccatgctctgaagactgcccacccagaatgtacagcctcatgacagagtgctggaatgagattccttctaggagaccaagatttaaagatattcacgtccggcttcggtcctgggagggactctcaagtcacacaagctctactactccttcagggggaaatgccaccacacagacaacctccctcagtgccagcccagtgagtaatctcagtaaccccagatatcctaattacatgttcccgagccagggtattacaccacagggccagattgctggtttcattggcccgccaatacctcagaaccagcgattcattcccatcaatggatacccaatacctcctggatatgcagcgtttccagctgcccactaccagccaacaggtcctcccagagtgattcagcactgcccacctcccaagagtcggtccccaagcagtgccagtgggtcgactagcactggccatgtgactagcttgccctcatcaggatccaatcaggaagcaaatattcctttactaccacacatgtcaattccaaatcatcctggtggaatgggtatcaccgtttttggcaacaaatctcaaaaaccctacaaaattgactcaaagcaagcatctttactaggagacgccaatattcatggacacaccgaatctatgatttctgcagaactgtaa

SEQ ID NO: 757 - DNA, 2832 bp, Homo sapiens
atggcccggggctcggcgctcccgcggcggccgctgctgtgcatcccggccgtctgggcggccgccgcgcttctgctctcagtgtcccggacttcaggtgaagtggaggttctggatccgaacgaccctttaggaccccttgatgggcaggacggcccgattccaactctgaaaggttactttctgaattttctggagccagtaaacaatatcaccattgtccaaggccagacggcaattctgcactgcaaggtggcaggaaacccaccccctaacgtgcggtggctaaagaatgatgccccggtggtgcaggagccgcggcggatcatcatccggaagacagaatatggttcacgactgcgaatccaggacctggacacgacagacactggctactaccagtgcgtggccaccaacgggatgaagaccattaccgccactggcgtcctgtttgtgcggctgggtccaacgcacagcccaaatcataactttcaggatgattaccacgaggatgggttctgccagccttaccggggaattgcctgtgcacgcttcattggcaaccggaccatttatgtggactcgcttcagatgcagggggagattgaaaaccgaatcacagcggccttcaccatgatcggcacgtctacgcacctgtcggaccagtgctcacagttcgccatcccatccttctgccacttcgtgtttcctctgtgcgacgcgcgctcccgggcacccaagccgcgtgagctgtgccgcgacgagtgcgaggtgctggagagcgacctgtgccgccaggagtacaccatcgcccgctccaacccgctcatcctcatgcggcttcagctgcccaagtgtgaggcgctgcccatgcctgagagccccgacgctgccaactgcatgcgcattggcatcccagccgagaggctgggccgctaccatcagtgctataacggctcaggcatggattacagaggaacggcaagcaccaccaagtcaggccaccagtgccagccgtgggccctgcagcacccccacagccaccacctgtccagcacagacttccctgagcttggaggggggcacgcctactgccggaaccccggaggccagatggagggcccctggtgctttacgcagaataaaaacgtacgcatggaactgtgtgacgtaccctcgtgtagtccccgagacagcagcaagatggggattctgtacatcttggtccccagcatcgcaattccactggtcatcgcttgccttttcttcttggtttgcatgtgccggaataagcagaaggcatctgcgtccacaccgcagcggcgacagctgatggcctcgcccagccaagacatggaaatgcccctcattaaccagcacaaacaggccaaactcaaagagatcagcctgtctgcggtgaggttcatggaggagctgggagaggaccggtttgggaaagtctacaaaggtcacctgttcggccctgccccgggggagcagacccaggctgtggccatcaaaacgctgaaggacaaagcggaggggcccctgcgggaggagttccggcatgaggctatgctgcgagcacggctgcaacaccccaacgtcgtctgcctgctgggcgtggtgaccaaggaccagcccctgagcatgatcttcagctactgttcgcacggcgacctccacgaattcctggtcatgcgctcgccgcactcggacgtgggcagcaccgatgatgaccgcacggtgaagtccgccctggagccccccgacttcgtgcaccttgtggcacagatcgcggcggggatggagtacctatccagccaccacgtggttcacaaggacctggccacccgcaatgtgctagtgtacgacaagctgaacgtgaagatctcagacttgggcctcttccgagaggtgtatgccgccgattactacaagctgctggggaactcgctgctgcctatccgctggatggccccagaggccatcatgtacggcaagttctccatcgactcagacatctggtcctacggtgtggtcctgtgggaggtcttcagctacggcctgcagccctactgcgggtactccaaccaggatgtggtggagatgatccggaaccggcaggtgctgccttgccccgatgactgtcccgcctgggtgtatgccctcatgatcgagtgctggaacgagttccccagccggcggccccgcttcaaggacatccacagccggctccgagcctggggcaacctttccaactacaacagctcggcgcagacctcgggggccagcaacaccacgcagaccagctccctgagcaccagcccagtgagcaatgtgagcaacgcccgctacgtggggcccaagcagaaggccccgcccttcccacagccccagttcatccccatgaagggccagatcagacccatggtgcccccgccgcagctctacgtccccgtcaacggctaccagccggtgccggcctatggggcctacctgcccaacttctacccggtgcagatcccaatgcagatggccccgcagcaggtgcctcctcagatggtccccaagcccagctcacaccacagtggcagtggctccaccagcacaggctacgtcaccacggccccctccaacacatccatggcagacagggcagccctgctctcagagggcgctgatgacacacagaacgccccagaagatggggcccagagcaccgtgcaggaagcagaggaggaggaggaaggctctgtcccagagactgagctgctgggggactgtgacactctgcaggtggacgaggcccaagtccagctggaagcttga

SEQ ID NO: 758 - DNA, 2832 bp, Homo sapiens
atggcccggggctcggcgctcccgcggcggccgctgctgtgcatcccggccgtctgggcggccgccgcgcttctgctctcagtgtcccggacttcaggtgaagtggaggttctggatccgaacgaccctttaggaccccttgatgggcaggacggcccgattccaactctgaaaggttactttctgaattttctggagccagtaaacaatatcaccattgtccaaggccagacggcaattctgcactgcaaggtggcaggaaacccaccccctaacgtgcggtggctaaagaatgatgccccggtggtgcaggagccgcggcggatcatcatccggaagacagaatatggttcacgactgcgaatccaggacctggacacgacagacactggctactaccagtgcgtggccaccaacgggatgaagaccattaccgccactggcgtcctgtttgtgcggctgggtccaacgcacagcccaaatcataactttcaggatgattaccacgaggatgggttctgccagccttaccggggaattgcctgtgcacgcttcattggcaaccggaccatttatgtggactcgcttcagatgcagggggagattgaaaaccgaatcacagcggccttcaccatgatcggcacgtctacgcacctgtcggaccagtgctcacagttcgccatcccatccttctgccacttcgtgtttcctctgtgcgacgcgcgctcccggacacccaagccgcgtgagctgtgccgcgacgagtgcgaggtgctggagagcgacctgtgccgccaggagtacaccatcgcccgctccaacccgctcatcctcatgcggcttcagctgcccaagtgtgaggcgctgcccatgcctgagagccccgacgctgccaactgcatgcgcattggcatcccagccgagaggctgggccgctaccatcagtgctataacggctcaggcatggattacagaggaacggcaagcaccaccaagtcaggccaccagtgccagccgtgggccctgcagcacccccacagccaccacctgtccagcacagacttccctgagcttggaggggggcacgcctactgccggaaccccggaggccagatggagggcccctggtgctttacgcagaataaaaacgtacgcatggaactgtgtgacgtaccctcgtgtagtccccgagacagcagcaagatggggattctgtacatcttggtccccagcatcgcaattccactggtcatcgcttgccttttcttcttggtttgcatgtgccggaataagcagaaggcatctgcgtccacaccgcagcggcgacagctgatggcctcgcccagccaagacatggaaatgcccctcattaaccagcacaaacaggccaaactcaaagagatcagcctgtctgcggtgaggttcatggaggagctgggagaggaccggtttgggaaagtctacaaaggtcacctgttcggccctgccccgggggagcagacccaggctgtggccatcaaaacgctgaaggacaaagcggaggggcccctgcgggaggagttccggcatgaggctatgctgcgagcacggctgcaacaccccaacgtcgtctgcctgctgggcgtggtgaccaaggaccagcccctgagcatgatcttcagctactgttcgcacggcgacctccacgaattcctggtcatgcgctcgccgcactcggacgtgggcagcaccgatgatgaccgcacggtgaagtccgccctggagccccccgacttcgtgcaccttgtggcacagatcgcggcggggatggagtacctatccagccaccacgtggttcacaaggacctggccacccgcaatgtgctagtgtacgacaagctgaacgtgaagatctcagacttgggcctcttccgagaggtgtatgccgccgattactacaagctgctggggaactcgctgctgcctatccgctggatggccccagaggccatcatgtacggcaagttctccatcgactcagacatctggtcctacggtgtggtcctgtgggaggtcttcagctacggcctgcagccctactgcgggtactccaaccaggatgtggtggagatgatccggaaccggcaggtgctgccttgccccgatgactgtcccgcctgggtgtatgccctcatgatcgagtgctggaacgagttccccagccggcggccccgcttcaaggacatccacagccggctccgagcctggggcaacctttccaactacaacagctcggcgcagacctcgggggccagcaacaccacgcagaccagctccctgagcaccagcccagtgagcaatgtgagcaacgcccgctacgtggggcccaagcagaaggccccgcccttcccacagccccagttcatccccatgaagggccagatcagacccatggtgcccccgccgcagctctacatccccgtcaacggctaccagccggtgccggcctatggggcctacctgcccaacttctacccggtgcagatcccaatgcagatggccccgcagcaggtgcctcctcagatggtccccaagcccagctcacaccacagtggcagtggctccaccagcacaggctacgtcaccacggccccctccaacacatccatggcagacagggcagccctgctctcagagggcgctgatgacacacagaacgccccagaagatggggcccagagcaccgtgcaggaagcagaggaggaggaggaaggctctgtcccagagactgagctgctgggggactgtgacactctgcaggtggacgaggcccaagtccagctggaagcttga

SEQ ID NO: 759 - DNA, 7071 bp, Homo sapiens
atgaagaacatttactgtcttattccgaagcttgtcaattttgcaactcttggctgcctatggatttctgtggtgcagtgtacagttttaaatagctgcctaaagtcgtgtgtaactaatctgggccagcagcttgaccttggcacaccacataatctgagtgaaccgtgtatccaaggatgtcacttttggaactctgtagatcagaaaaactgtgctttaaagtgtaatgatacttatgccaccgtttgtgagcgggagtcgtgtgaggttggctgtagcagcgcggaaggtgcatatgaagaggaagtactggaaaatgcagacctaccaactgctccctttgcttcttccattggaagccacaatatgacattacgatggaaatctgcaaacttctctggagtaaaatacatcattcagtggaaatatgcacaacttctgggaagctggacttatactaagactgtgtccagaccgtcctatgtggtcaagcccctgcaccccttcactgagtacattttccgagtggtttggatcttcacagcgcagctgcagctctactcccctccaagtcccagttacaggactcatcctcatggagttcctgaaactgcacctttgattaggaatattgagagctcaagtcccgacactgtggaagtcagctgggatccacctcaattcccaggtggacctattttgggttataacttaaggctgatcagcaaaaatcaaaaattagatgcagggacacagagaaccagtttccagttttactccactttaccaaatactatctacaggttttctattgcagcagtaaatgaagttggtgagggtccagaagcagaatctagtattaccacttcatcttcagcagttcaacaagaggaacagtggctctttttatccagaaaaacttctctaagaaagagatctttaaaacatttagtagatgaagcacattgccttcggttggatgctatataccataatattacaggaatatctgttgatgtccaccagcaaattgtttatttctctgaaggaactctcatatgggcgaagaaggctgccaacatgtctgatgtatctgacctgagaattttttacagaggttcaggattaatttcttctatctccatagattggctttatcaaagaatgtatttcatcatggatgaactggtatgtgtctgtgatttagagaactgctcaaacatcgaggaaattactccaccctctattagtgcacctcaaaaaattgtggctgattcatacaatgggtatgtcttttacctcctgagagatggcatttatagagcagaccttcctgtaccatctggccggtgtgcagaagctgtgcgtattgtggagagttgcacgttaaaggactttgcaatcaagccacaagccaagcgaatcatttacttcaatgacactgcccaagtcttcatgtcaacatttctggatggctctgcttcccatctcatcctacctcgcatcccctttgctgatgtgaaaagttttgcttgtgaaaacaatgactttcttgtcacagatggcaaggtcattttccaacaggatgctttgtcttttaatgaattcatcgtgggatgtgacctgagtcacatagaagaatttgggtttggtaacttggtcatctttggctcatcctcccagctgcaccctctgccaggccgcccgcaggagctttcggtgctgtttggctctcaccaggctcttgttcaatggaagcctcctgcccttgccataggagccaatgtcatcctgatcagtgatattattgaactctttgaattaggcccttctgcctggcagaactggacctatgaggtgaaagtatccacccaagaccctcctgaagtcactcatattttcttgaacataagtggaaccatgctgaatgtacctgagctgcagagtgctatgaaatacaaggtttctgtgagagcaagttctccaaagaggccaggcccctggtcagagccctcagtgggtactaccctggtgccagctagtgaaccaccatttatcatggctgtgaaagaagatgggctttggagtaaaccattaaatagctttggcccaggagagttcttatcctctgatataggaaatgtgtcagacatggattggtataacaacagcctctactacagtgacacgaaaggcgacgtttttgtgtggctgctgaatgggacggatatctcagagaattatcacctacccagcattgcaggagcaggggctttagcttttgagtggctgggtcactttctctactgggctggaaagacatatgtgatacaaaggcagtctgtgttgacgggacacacagacattgttacccacgtgaagctattggtgaatgacatggtggtggattcagttggtggatatctctactggaccacactctattcagtggaaagcaccagactaaatggggaaagttcccttgtactacagacacagccttggttttctgggaaaaaggtaattgctctaactttagacctcagtgatgggctcctgtattggttggttcaagacagtcaatgtattcacctgtacacagctgttcttcggggacagagcactggggataccaccatcacagaatttgcagcctggagtacttctgaaatttcccagaatgcactgatgtactatagtggtcggctgttctggatcaatggctttaggattatcacaactcaagaaataggtcagaaaaccagtgtctctgttttggaaccagccagatttaatcagttcacaattattcagacatcccttaagcccctgccagggaacttttcctttacccctaaggttattccagattctgttcaagagtcttcatttaggattgaaggaaatgcttcaagttttcaaatcctgtggaatggtccccctgcggtagactggggtgtagttttctacagtgtagaatttagtgctcattctaagttcttggctagtgaacaacactctttacctgtatttactgtggaaggactggaaccttatgccttatttaatctttctgtcactccttatacctactggggaaagggccccaaaacatctctgtcacttcgagcacctgaaacagttccatcagcaccagagaaccccagaatatttatattaccaagtggaaaatgctgcaacaagaatgaagttgtggtggaatttaggtggaacaaacctaagcatgaaaatggggtgttaacaaaatttgaaattttctacaatatatccaatcaaagtattacaaacaaaacatgtgaagactggattgctgtcaatgtcactccctcagtgatgtcttttcaacttgaaggcatgagtcccagatgctttattgccttccaggttagggcctttacatctaaggggccaggaccatatgctgacgttgtaaagtctacaacatcagaaatcaacccatttcctcacctcataactcttcttggtaacaagatagtttttttagatatggatcaaaatcaagttgtgtggacgttttcagcagaaagagttatcagtgccgtttgctacacagctgataatgagatgggatattatgctgaaggggactcactctttcttctgcacttgcacaatcgctctagctctgagcttttccaagattcactggtttttgatatcacagttattacaattgactggatttcaaggcacctctactttgcactgaaagaatcacaaaatggaatgcaagtatttgatgttgatcttgaacacaaggtgaaatatcccagagaggtgaagattcacaataggaattcaacaataatttctttttctgtatatcctcttttaagtcgcttgtattggacagaagtttccaattttggctaccagatgttctactacagtattatcagtcacaccttgcaccgaattctgcaacccacagctacaaaccaacaaaacaaaaggaatcaatgttcttgtaatgtgactgaatttgagttaagtggagcaatggctattgatacctctaacctagagaaaccattgatatactttgccaaagcacaagagatctgggcaatggatctggaaggctgtcagtgttggagagttatcacagtacctgctatgctcgcaggaaaaacccttgttagcttaactgtggatggagatcttatatactggatcatcacagcaaaggacagcacacagatttatcaggcaaagaaaggaaatggggccatcgtttcccaggtgaaggccctaaggagtaggcatatcttggcttacagttcagttatgcagccttttccagataaagcgtttctgtctctagcttcagacactgtggaaccaactatacttaatgccactaacactagcctcacaatcagattacctctggccaagacaaacctcacatggtatggcatcaccagccctactccaacatacctggtttattatgcagaagttaatgacaggaaaaacagctctgacttgaaatatagaattctggaatttcaggacagtatagctcttattgaagatttacaaccattttcaacatacatgatacagatagctgtaaaaaattattattcagatcctttggaacatttaccaccaggaaaagagatttggggaaaaactaaaaatggagtaccagaggcagtgcagctcattaatacaactgtgcggtcagacaccagcctcattatatcttggagagaatctcacaagccaaatggacctaaagaatcagtccgttatcagttggcaatctcacacctggccctaattcctgaaactcctctaagacaaagtgaatttccaaatggaaggctcactctccttgttactagactgtctggtggaaatatttatgtgttaaaggttcttgcctgccactctgaggaaatgtggtgtacagagagtcatcctgtcactgtggaaatgtttaacacaccagagaaaccttattccttggttccagagaacactagtttgcaatttaattggaaggctccattgaatgttaacctcatcagattttgggttgagctacagaagtggaaatacaatgagttttaccatgttaaaacttcatgcagccaaggtcctgcttatgtctgtaatatcacaaatctacaaccttatacttcatataatgtcagagtagtggtggtttataagacgggagaaaatagcacctcacttccagaaagctttaagacaaaagctggagtcccaaataaaccaggcattcccaaattactagaagggagtaaaaattcaatacagtgggagaaagctgaagataatggatgtagaattacatactatatccttgagataagaaagagcacttcaaataatttacagaaccagaatttaaggtggaagatgacatttaatggatcctgcagtagtgtttgcacatggaagtccaaaaacctgaaaggaatatttcagttcagagtagtagctgcaaataatctagggtttggtgaatatagtggaatcagtgagaatattatattagttggagatgatttttggataccagaaacaagtttcatacttactattatagttggaatatttctggttgttacaatcccactgacctttgtctggcatagaagattaaagaatcaaaaaagtgccaaggaaggggtgacagtgcttataaacgaagacaaagagttggctgagctgcgaggtctggcagccggagtaggcctggctaatgcctgctatgcaatacatactcttccaacccaagaggagattgaaaatcttcctgccttccctcgggaaaaactgactctgcgtctcttgctgggaagtggagcctttggagaagtgtatgaaggaacagcagtggacatcttaggagttggaagtggagaaatcaaagtagcagtgaagactttgaagaagggttccacagaccaggagaagattgaattcctgaaggaggcacatctgatgagcaaatttaatcatcccaacattctgaagcagcttggagtttgtctgctgaatgaaccccaatacattatcctggaactgatggagggaggagaccttcttacttatttgcgtaaagcccggatggcaacgttttatggtcctttactcaccttggttgaccttgtagacctgtgtgtagatatttcaaaaggctgtgtctacttggaacggatgcatttcattcacagggatctggcagctagaaattgccttgtttccgtgaaagactataccagtccacggatagtgaagattggagactttggactcgccagagacatctataaaaatgattactatagaaagagaggggaaggcctgctcccagttcggtggatggctccagaaagtttgatggatggaatcttcactactcaatctgatgtatggtcttttggaattctgatttgggagattttaactcttggtcatcagccttatccagctcattccaaccttgatgtgttaaactatgtgcaaacaggagggagactggagccaccaagaaattgtcctgatgatctgtggaatttaatgacccagtgctgggctcaagaacccgaccaaagacctacttttcatagaattcaggaccaacttcagttattcagaaattttttcttaaatagcatttataagtccagagatgaagcaaacaacagtggagtcataaatgaaagctttgaaggtgaagatggcgatgtgatttgtttgaattcagatgacattatgccagttgctttaatggaaacgaagaaccgagaagggttaaactatatggtacttgctacagaatgtggccaaggtgaagaaaagtctgagggtcctctaggctcccaggaatctgaatcttgtggtctgaggaaagaagagaaggaaccacatgcagacaaagatttctgccaagaaaaacaagtggcttactgcccttctggcaagcctgaaggcctgaactatgcctgtctcactcacagtggatatggagatgggtctgattaa

SEQ ID NO: 760 - DNA, 7044 bp, Homo sapiens
atgaagaacatttactgtcttattccgaagcttgtcaattttgcaactcttggctgcctatggatttctgtggtgcagtgtacagttttaaatagctgcctaaagtcgtgtgtaactaatctgggccagcagcttgaccttggcacaccacataatctgagtgaaccgtgtatccaaggatgtcacttttggaactctgtagatcagaaaaactgtgctttaaagtgtcgggagtcgtgtgaggttggctgtagcagcgcggaaggtgcatatgaagaggaagtactggaaaatgcagacctaccaactgctccctttgcttcttccattggaagccacaatatgacattacgatggaaatctgcaaacttctctggagtaaaatacatcattcagtggaaatatgcacaacttctgggaagctggacttatcctaagactgtgtccagaccgtcctatgtggtcaagcccctgcaccccttcactgagtacattttccgagtggtttggatcttcacagcgcagctgcagctctactcccctccaagtcccagttacaggactcatcctcatggagttcctgaaactgcacctttgattaggaatattgagagctcaagtcccgacactgtggaagtcagctgggatccacctcaattcccaggtggacctattttgggttataacttaaggctgatcagcaaaaatcaaaaattagatgcagggacacagagaaccagtttccagttttactccactttaccaaatactatctacaggttttctattgcagcagtaaatgaagttggtgagggtccagaagcagaatctagtattaccacttcatcttcagcagttcaacaagaggaacagtggctctttttatccagaaaaacttctctaagaaagagatctttaaaacatttagtagatgaagcacattgccttcggttggatgctatataccataatattacaggaatatctgttgatgtccaccagcaaattgtttatttctctgaaggaactctcatatgggcgaagaaggctgccaacatgtctgatgtatctgacctgagaattttttacagaggttcaggattaatttcttctatctccatagattggctttatcaaagaatgtatttcatcatggatgaactggtatgtgtctgtgatttagagaactgctcaaacatcgaggaaattactccaccctctattagtgcacctcaaaaaattgtggctgattcatacaatgggtatgtcttttacctcctgagagatggcatttatagagcagaccttcctgtaccatctggccggtgtgcagaagctgtgcgtattgtggagagttgcacgttaaaggactttgcaatcaagccacaagccaagcgaatcatttacttcaatgacactgcccaagtcttcatgtcaacatttctggatggctctgcttcccatctcatcctacctcgcatcccctttgctgatgtgaaaagttttgcttgtgaaaacaatgactttcttgtcacagatggcaaggtcattttccaacaggatgctttgtcttttaatgaattcatcgtgggatgtgacctgagtcacatagaagaatttgggtttggtaacttggtcatctttggctcatcctcccagctgcaccctctgccaggccgcccgcaggagctttcggtgctgtttggctctcaccaggctcttgttcaatggaagcctcctgcccttgccataggagccaatgtcatcctgatcagtgatattattgaactctttgaattaggcccttctgcctggcagaactggacctatgaggtgaaagtatccacccaagaccctcctgaagtcactcatattttcttgaacataagtggaaccatgctgaatgtacctgagctgcagagtgctatgaaatacaaggtttctgtgagagcaagttctccaaagaggccaggcccctggtcagagccctcagtgggtactaccctggtgccagctagtgaaccaccatttatcatggctgtgaaagaagatgggctttggagtaaaccattaaatagctttggcccaggagagttcttatcctctgatataggaaatgtgtcagacatggattggtataacaacagcctctactacagtgacacgaaaggcgacgtttttgtgtggctgctgaatgggacggatatctcagagaattatcacctacccagcattgcaggagcaggggctttagcttttgagtggctgggtcactttctctactgggctggaaagacatatgtgatacaaaggcagtctgtgttgacgggacacacagacattgttacccacgtgaagctattggtgaatgacatggtggtggattcagttggtggatatctctactggaccacactctattcagtggaaagcaccagactaaatggggaaagttcccttgtactacagacacagccttggttttctgggaaaaaggtaattgctctaactttagacctcagtgatgggctcctgtattggttggttcaagacagtcaatgtattcacctgtacacagctgttcttcggggacagagcactggggataccaccatcacagaatttgcagcctggagtacttctgaaatttcccagaatgcactgatgtactatagtggtcggctgttctggatcaatggctttaggattatcacaactcaagaaataggtcagaaaaccagtgtctctgttttggaaccagccagatttaatcagttcacaattattcagacatcccttaagcccctgccagggaacttttcctttacccctaaggttattccagattctgttcaagagtcttcatttaggattgaaggaaatgcttcaagttttcaaatcctgtggaatggtccccctgcggtagactggggtgtagttttctacagtgtagaatttagtgctcattctaagttcttggctagtgaacaacactctttacctgtatttactgtggaaggactggaaccttatgccttatttaatctttctgtcactccttatacctactggggaaagggccccaaaacatctctgtcacttcgagcacctgaaacagttccatcagcaccagagaaccccagaatatttatattaccaagtggaaaatgctgcaacaagaatgaagttgtggtggaatttaggtggaacaaacctaagcatgaaaatggggtgttaacaaaatttgaaattttctacaatatatccaatcaaagtattacaaacaaaacatgtgaagactggattgctgtcaatgtcactccctcagtgatgtcttttcaacttgaaggcatgagtcccagatgctttattgccttccaggttagggcctttacatctaaggggccaggaccatatgctgacgttgtaaagtctacaacatcagaaatcaacccatttcctcacctcataactcttcttggtaacaagatagtttttttagatatggatcaaaatcaagttgtgtggacgttttcagcagaaagagttatcagtgccgtttgctacacagctgataatgagatgggatattatgctgaaggggactcactctttcttctgcacttgcacaatcgctctagctctgagcttttccaagattcactggtttttgatatcacagttattacaattgactggatttcaaggcacctctactttgcactgaaagaatcacaaaatggaatgcaagtatttgatgttgatcttgaacacaaggtgaaatatcccagagaggtgaagattcacaataggaattcaacaataatttctttttctgtatatcctcttttaagtcgcttgtattggacagaagtttccaattttggctaccagatgttctactacagtattatcagtcacaccttgcaccgaattctgcaacccacagctacaaaccaacaaaacaaaaggaatcaatgttcttgtaatgtgactgaatttgagttaagtggagcaatggctattgatacctctaacctagagaaaccattgatatactttgccaaagcacaagagatctgggcaatggatctggaaggctgtcagtgttggagagttatcacagtacctgctatgctcgcaggaaaaacccttgttagcttaactgtggatggagatcttatatactggatcatcacagcaaaggacagcacacagatttatcaggcaaagaaaggaaatggggccatcgtttcccaggtgaaggccctaaggagtaggcatatcttggcttacagttcagttatgcagccttttccagataaagcgtttctgtctctagcttcagacactgtggaaccaactatacttaatgccactaacactagcctcacaatcagattacctctggccaagacaaacctcacatggtatggcatcaccagccctactccaacatacctggtttattatgcagaagttaatgacaggaaaaacagctctgacttgaaatatagaattctggaatttcaggacagtatagctcttattgaagatttacaaccattttcaacatacatgatacagatagctgtaaaaaattattattcagatcctttggaacatttaccaccaggaaaagagatttggggaaaaactaaaaatggagtaccagaggcagtgcagctcattaatacaactgtgcggtcagacaccagcctcattatatcttggagagaatctcacaagccaaatggacctaaagaatcagtccgttatcagttggcaatctcacacctggccctaattcctgaaactcctctaagacaaagtgaatttccaaatggaaggctcactctccttgttactagactgtctggtggaaatatttatgtgttaaaggttcttgcctgccactctgaggaaatgtggtgtacagagagtcatcctgtcactgtggaaatgtttaacacaccagagaaaccttattccttggttccagagaacactagtttgcaatttaattggaaggctccattgaatgttaacctcatcagattttgggttgagctacagaagtggaaatacaatgagttttaccatgttaaaacttcatgcagccaaggtcctgcttatgtctgtaatatcacaaatctacaaccttatacttcatataatgtcagagtagtggtggtttataagacgggagaaaatagcacctcacttccagaaagctttaagacaaaagctggagtcccaaataaaccaggcattcccaaattactagaagggagtaaaaattcaatacagtgggagaaagctgaagataatggatgtagaattacatactatatccttgagataagaaagagcacttcaaataatttacagaaccagaatttaaggtggaagatgacatttaatggatcctgcagtagtgtttgcacatggaagtccaaaaacctgaaaggaatatttcagttcagagtagtagctgcaaataatctagggtttggtgaatatagtggaatcagtgagaatattatattagttggagatgatttttggataccagaaacaagtttcatacttactattatagttggaatatttctggttgttacaatcccactgacctttgtctggcatagaagattaaagaatcaaaaaagtgccaaggaaggggtgacagtgcttataaacgaagacaaagagttggctgagctgcgaggtctggcagccggagtaggcctggctaatgcctgctatgcaatacatactcttccaacccaagaggagattgaaaatcttcctgccttccctcgggaaaaactgactctgcgtctcttgctgggaagtggagcctttggagaagtgtatgaaggaacagcagtggacatcttaggagttggaagtggagaaatcaaagtagcagtgaagactttgaagaagggttccacagaccaggagaagattgaattcctgaaggaggcacatctgatgagcaaatttaatcatcccaacattctgaagcagcttggagtttgtctgctgaatgaaccccaatacattatcctggaactgatggagggaggagaccttcttacttatttgcgtaaagcccggatggcaacgttttatggtcctttactcaccttggttgaccttgtagacctgtgtgtagatatttcaaaaggctgtgtctacttggaacggatgcatttcattcacagggatctggcagctagaaattgccttgtttccgtgaaagactataccagtccacggatagtgaagattggagactttggactcgccagagacatctataaaaatgattactatagaaagagaggggaaggcctgctcccagttcggtggatggctccagaaagtttgatggatggaatcttcactactcaatctgatgtatggtcttttggaattctgatttgggagattttaactcttggtcatcagccttatccagctcattccaaccttgatgtgttaaactatgtgcaaacaggagggagactggagccaccaagaaattgtcctgatgatctgtggaatttaatgacccagtgctgggctcaagaacccgaccaaagacctacttttcatagaattcaggaccaacttcagttattcagaaattttttcttaaatagcatttataagtccagagatgaagcaaacaacagtggagtcataaatgaaagctttgaaggtgaagatggcgatgtgatttgtttgaattcagatgacattatgccagttgctttaatggaaacgaagaaccgagaagggttaaactatatggtacttgctacagaatgtggccaaggtgaagaaaagtctgagggtcctctaggctcccaggaatctgaatcttgtggtctgaggaaagaagagaaggaaccacatgcagacaaagatttctgccaagaaaaacaagtggcttactgcccttctggcaagcctgaaggcctgaactatgcctgtctcactcacagtggatatggagatgggtctgattaa

SEQ ID NO: 761 - DNA, 7044 bp, Homo sapiens
atgaagaacatttactgtcttattccgaagcttgtcaattttgcaactcttggctgcctatggatttctgtggtgcagtgtacagttttaaatagctgcctaaagtcgtgtgtaactaatctgggccagcagcttgaccttggcacaccacataatctgagtgaaccgtgtatccaaggatgtcacttttggaactctgtagatcagaaaaactgtgctttaaagtgtcgggagtcgtgtgaggttggctgtagcagcgcggaaggtgcatatgaagaggaagtactggaaaatgcagacctaccaactgctccctttgcttcttccattggaagccacaatatgacattacgatggaaatctgcaaacttctctggagtaaaatacatcattcagtggaaatatgcacaacttctgggaagctggacttatactaagactgtgtccagaccgtcctatgtggtcaagcccctgcaccccttcactgagtacattttccaagtggtttggatcttcacagcgcagctgcagctctactcccctccaagtcccagttacaggactcatcctcatggagttcctgaaactgcacctttgattaggaatattgagagctcaagtcccgacactgtggaagtcagctgggatccacctcaattcccaggtggacctattttgggttataacttaaggctgatcagcaaaaatcaaaaattagatgcagggacacagagaaccagtttccagttttactccactttaccaaatactatctacaggttttctattgcagcagtaaatgaagttggtgagggtccagaagcagaatctagtattaccacttcatcttcagcagttcaacaagaggaacagtggctctttttatccagaaaaacttctctaagaaagagatctttaaaacatttagtagatgaagcacattgccttcggttggatgctatataccataatattacaggaatatctgttgatgtccaccagcaaattgtttatttctctgaaggaactctcatatgggcgaagaaggctgccaacatgtctgatgtatctgacctgagaattttttacagaggttcaggattaatttcttctatctccatagattggctttatcaaagaatgtatttcatcatggatgaactggtatgtgtctgtgatttagagaactgctcaaacatcgaggaaattactccaccctctattagtgcacctcaaaaaattgtggctgattcatacaatgggtatgtcttttacctcctgagagatggcatttatagagcagaccttcctgtaccatctggccggtgtgcagaagctgtgcgtattgtggagagttgcacgttaaaggactttgcaatcaagccacaagccaagcgaatcatttacttcaatgacactgcccaagtcttcatgtcaacatttctggatggctctgcttcccatctcatcctacctcgcatcccctttgctgatgtgaaaagttttgcttgtgaaaacaatgactttcttgtcacagatggcaaggtcattttccaacaggatgctttgtcttttaatgaattcatcgtgggatgtgacctgagtcacatagaagaatttgggtttggtaacttggtcatctttggctcatcctcccagctgcaccctctgccaggccgcccgcaggagctttcggtgctgtttggctctcaccaggctcttgttcaatggaagcctcctgcccttgccataggagccaatgtcatcctgatcagtgatattattgaactctttgaattaggcccttctgcctggcagaactggacctatgaggtgaaagtatccacccaagaccctcctgaagtcactcatattttcttgaacataagtggaaccatgctgaatgtacctgagctgcagagtgctatgaaatacaaggtttctgtgagagcaagttctccaaagaggccaggcccctggtcagagccctcagtgggtactaccctggtgccagctagtgaaccaccatttatcatggctgtgaaagaagatgggctttggagtaaaccattaaatagctttggcccaggagagttcttatcctctgatataggaaatgtgtcagacatggattggtataacaacagcctctactacagtgacacgaaaggcgacgtttttgtgtggctgctgaatgggacggatatctcagagaattatcacctacccagcattgcaggagcaggggctttagcttttgagtggctgggtcactttctctactgggctggaaagacatatgtgatacaaaggcagtctgtgttgacgggacacacagacattgttacccacgtgaagctattggtgaatgacatggtggtggattcagttggtggatatctctactggaccacactctattcagtggaaagcaccagactaaatggggaaagttcccttgtactacagacacagccttggttttctgggaaaaaggtaattgctctaactttagacctcagtgatgggctcctgtattggttggttcaagacagtcaatgtattcacctgtacacagctgttcttcggggacagagcactggggataccaccatcacagaatttgcagcctggagtacttctgaaatttcccagaatgcactgatgtactatagtggtcggctgttctggatcaatggctttaggattatcacaactcaagaaataggtcagaaaaccagtgtctctgttttggaaccagccagatttaatcagttcacaattattcagacatcccttaagcccctgccagggaacttttcctttacccctaaggttattccagattctgttcaagagtcttcatttaggattgaaggaaatgcttcaagttttcaaatcctgtggaatggtccccctgcggtagactggggtgtagttttctacagtgtagaatttagtgctcattctaagttcttggctagtgaacaacactctttacctgtatttactgtggaaggactggaaccttatgccttatttaatctttctgtcactccttatacctactggggaaagggccccaaaacatctctgtcacttcgagcacctgaaacagttccatcagcaccagagaaccccagaatatttatattaccaagtggaaaatgctgcaacaagaatgaagttgtggtggaatttaggtggaacaaacctaagcatgaaaatggggtgttaacaaaatttgaaattttctacaatatatccaatcaaagtattacaaacaaaacatgtgaagactggattgctgtcaatgtcactccctcagtgatgtcttttcaacttgaaggcatgagtcccagatgctttattgccttccaggttagggcctttacatctaaggggccaggaccatatgctgacgttgtaaagtctacaacatcagaaatcaacccatttcctcacctcataactcttcttggtaacaagatagtttttttagatatggatcaaaatcaagttgtgtggacgttttcagcagaaagagttatcagtgccgtttgctacacagctgataatgagatgggatattatgctgaaggggactcactctttcttctgcacttgcacaatcgctctagctctgagcttttccaagattcactggtttttgatatcacagttattacaattgactggatttcaaggcacctctactttgcactgaaagaatcacaaaatggaatgcaagtatttgatgttgatcttgaacacaaggtgaaatatcccagagaggtgaagattcacaataggaattcaacaataatttctttttctgtatatcctcttttaagtcgcttgtattggacagaagtttccaattttggctaccagatgttctactacagtattatcagtcacaccttgcaccgaattctgcaacccacagctacaaaccaacaaaacaaaaggaatcaatgttcttgtaatgtgactgaatttgagttaagtggagcaatggctattgatacctctaacctagagaaaccattgatatactttgccaaagcacaagagatctgggcaatggatctggaaggctgtcagtgttggagagttatcacagtacctgctatgctcgcaggaaaaacccttgttagcttaactgtggatggagatcttatatactggatcatcacagcaaaggacagcacacagatttatcaggcaaagaaaggaaatggggccatcgtttcccaggtgaaggccctaaggagtaggcatatcttggcttacagttcagttatgcagccttttccagataaagcgtttctgtctctagcttcagacactgtggaaccaactatacttaatgccactaacactagcctcacaatcagattacctctggccaagacaaacctcacatggtatggcatcaccagccctactccaacatacctggtttattatgcagaagttaatgacaggaaaaacagctctgacttgaaatatagaattctggaatttcaggacagtatagctcttattgaagatttacaaccattttcaacatacatgatacagatagctgtaaaaaattattattcagatcctttggaacatttaccaccaggaaaagagatttggggaaaaactaaaaatggagtaccagaggcagtgcagctcattaatacaactgtgcggtcagacaccagcctcattatatcttggagagaatctcacaagccaaatggacctaaagaatcagtccgttatcagttggcaatctcacacctggccctaattcctgaaactcctctaagacaaagtgaatttccaaatggaaggctcactctccttgttactagactgtctggtggaaatatttatgtgttaaaggttcttgcctgccactctgaggaaatgtggtgtacagagagtcatcctgtcactgtggaaatgtttaacacaccagagaaaccttattccttggttccagagaacactagtttgcaatttaattggaaggctccattgaatgttaacctcatcagattttgggttgagctacagaagtggaaatacaatgagttttaccatgttaaaacttcatgcagccaaggtcctgcttatgtctgtaatatcacaaatctacaaccttatacttcatataatgtcagagtagtggtggtttataagacgggagaaaatagcacctcacttccagaaagctttaagacaaaagctggagtcccaaataaaccaggcattcccaaattactagaagggagtaaaaattcaatacagtgggagaaagctgaagataatggatgtagaattacatactatatccttgagataagaaagagcacttcaaataatttacagaaccagaatttaaggtggaagatgacatttaatggatcctgcagtagtgtttgcacatggaagtccaaaaacctgaaaggaatatttcagttcagagtagtagctgcaaataatctagggtttggtgaatatagtggaatcagtgagaatattatattagttggagatgatttttggataccagaaacaagtttcatacttactattatagttggaatatttctggttgttacaatcccactgacctttgtctggcatagaagattaaagaatcaaaaaagtgccaaggaaggggtgacagtgcttataaacgaagacaaagagttggctgagctgcgaggtctggcagccggagtaggcctggctaatgcctgctatgcaatacatactcttccaacccaagaggagattgaaaatcttcctgccttccctcgggaaaaactgactctgcgtctcttgctgggaagtggagcctttggagaagtgtatgaaggaacagcagtggacatcttaggagttggaagtggagaaatcaaagtagcagtgaagactttgaagaagggttccacagaccaggagaagattgaattcctgaaggaggcacatctgatgagcaaatttaatcatcccaacattctgaagcagcttggagtttgtctgctgaatgaaccccaatacattatcctggaactgatggagggaggagaccttcttacttatttgcgtaaagcccggatggcaacgttttatggtcctttactcaccttggttgaccttgtagacctgtgtgtagatatttcaaaaggctgtgtctacttggaacggatgcatttcattcacagggatctggcagctagaaattgccttgtttccgtgaaagactataccagtccacggatagtgaagattggagactttggactcgccagagacatctataaaaatgattactatagaaagagaggggaaggcctgctcccagttcggtggatggctccagaaagtttgatggatggaatcttcactactcaatctgatgtatggtcttttggaattctgatttgggagattttaactcttggtcatcagccttatccagctcattccaaccttgatgtgttaaactatgtgcaaacaggagggagactggagccaccaagaaattgtcctgatgatctgtggaatttaatgacccagtgctgggctcaagaacccgaccaaagacctacttttcatagaattcaggaccaacttcagttattcagaaattttttcttaaatagcatttataagtccagagatgaagcaaacaacagtggagtcataaatgaaagctttgaaggtgaagatggcgatgtgatttgtttgaattcagatgacattatgccagttgctttaatggaaacgaagaaccgagaagggttaaactatatggtacttgctacagaatgtggccaaggtgaagaaaagtctgagggtcctctaggctcccaggaatctgaatcttgtggtctgaggaaagaagagaaggaaccacatgcagacaaagatttctgccaagaaaaacaagtggcttactgcccttctggcaagcctgaaggcctgaactatgcctgtctcactcacagtggatatggagatgggtctgattaa

SEQ ID NO: 762 - DNA, 7044 bp, Homo sapiens
atgaagaacatttactgtcttattccgaagcttgtcaattttgcaactcttggctgcctatggatttctgtggtgcagtgtacagttttaaatagctgcctaaagtcgtgtgtaactaatctgggccagcagcttgaccttggcacaccacataatctgagtgaaccgtgtatccaaggatgtcacttttggaactctgtagatcagaaaaactgtgctttaaagtgtcgggagtcgtgtgaggttggctgtagcagcgcggaaggtgcatatgaagaggaagtactggaaaatgcagacctaccaactgctccctttgcttcttccattggaagccacaatatgacattacgatggaaatctgcaaacttctctggagtaaaatacatcattcagtggaaatatgcacaacttctgggaagctggacttatactaagactgtgtccagaccgtcctatgtggtcaagcccctgcaccccttcactgagtacattttccgagtggtttggatcttcacagcgcagctgcagctctactcccctccaagtcccagttacaggactcatcctcatggagttcctgaaactgcacctttgattaggaatattgagagctcaagtcccgacactgtggaagtcagctgggatccacctcaattcccaggtggacctattttgggttataacttaaggctgatcagcaaaaatcaaaaattagatgcagggacacagagaaccagtttccagttttactccactttaccaaatactatctacaggttttctattgcagcagtaaatgaagttggtgagggtccagaagcagaatctagtattaccacttcatcttcagcagttcaacaagaggaacagtggctctttttatccagaaaaacttctctaagaaagagatctttaaaacatttagtagatgaagcacattgccttcggttggatgctatataccataatattacaggaatatctgttgatgtccaccagcaaattgtttatttctctgaaggaactctcatatgggcgaagaaggctgccaacatgtctgatgtatctgacctgagaattttttacagaggttcaggattaatttcttctatctccatagattggctttatcaaagaatgtatttcatcatggatgaactggtatgtgtctgtgatttagagaactgctcaaacatcgaggaaattactccaccctctattagtgcacctcaaaaaattgtggctgattcatacaatgggtatgtcttttacctcctgagagatggcatttatagagcagaccttcctgtaccatctggccggtgtgcagaagctgtgcgtattgtggagagttgcacgttaaaggactttgcaatcaagccacaagccaagcgaatcatttacttcaatgacactgcccaagtcttcatgtcaacatttctggatggctctgcttcccatctcatcctacctcgcatcccctttgctgatgtgaaaagttttgcttgtgaaaacaatgactttcttgtcacagatggcaaggtcattttccaacaggatgctttgtcttttaatgaattcatcgtgggatgtgacctgagtcacatggaagaatttgggtttggtaacttggtcatctttggctcatcctcccagctgcaccctctgccaggccgcccgcaggagctttcggtgctgtttggctctcaccaggctcttgttcaatggaagcctcctgcccttgccataggagccaatgtcatcctgatcagtgatattattgaactctttgaattaggcccttctgcctggcagaactggacctatgaggtgaaagtatccacccaagaccctcctgaagtcactcatattttcttgaacataagtggaaccatgctgaatgtacctgagctgcagagtgctatgaaatacaaggtttctgtgagagcaagttctccaaagaggccaggcccctggtcagagccctcagtgggtactaccctggtgccagctagtgaaccaccatttatcatggctgtgaaagaagatgggctttggagtaaaccattaaatagctttggcccaggagagttcttatcctctgatataggaaatgtgtcagacatggattggtataacaacagcctctactacagtgacacgaaaggcgacgtttttgtgtggctgctgaatgggacggatatctcagagaattatcacctacccagcattgcaggagcaggggctttagcttttgagtggctgggtcactttctctactgggctggaaagacatatgtgatacaaaggcagtctgtgttgacgggacacacagacattgttacccacgtgaagctattggtgaatgacatggtggtggattcagttggtggatatctctactggaccacactctattcagtggaaagcaccagactaaatggggaaagttcccttgtactacagacacagccttggttttctgggaaaaaggtaattgctctaactttagacctcagtgatgggctcctgtattggttggttcaagacagtcaatgtattcacctgtacacagctgttcttcggggacagagcactggggataccaccatcacagaatttgcagcctggagtacttctgaaatttcccagaatgcactgatgtactatagtggtcggctgttctggatcaatggctttaggattatcacaactcaagaaataggtcagaaaaccagtgtctctgttttggaaccagccagatttaatcagttcacaattattcagacatcccttaagcccctgccagggaacttttcctttacccctaaggttattccagattctgttcaagagtcttcatttaggattgaaggaaatgcttcaagttttcaaatcctgtggaatggtccccctgcggtagactggggtgtagttttctacagtgtagaatttagtgctcattctaagttcttggctagtgaacaacactctttacctgtatttactgtggaaggactggaaccttatgccttatttaatctttctgtcactccttatacctactggggaaagggccccaaaacatctctgtcacttcgagcacctgaaacagttccatcagcaccagagaaccccagaatatttatattaccaagtggaaaatgctgcaacaagaatgaagttgtggtggaatttaggtggaacaaacctaagcatgaaaatggggtgttaacaaaatttgaaattttctacaatatatccaatcaaagtattacaaacaaaacatgtgaagactggattgctgtcaatgtcactccctcagtgatgtcttttcaacttgaaggcatgagtcccagatgctttattgccttccaggttagggcctttacatctaaggggccaggaccatatgctgacgttgtaaagtctacaacatcagaaatcaacccatttcctcacctcataactcttcttggtaacaagatagtttttttagatatggatcaaaatcaagttgtgtggacgttttcagcagaaagagttatcagtgccgtttgctacacagctgataatgagatgggatattatgctgaaggggactcactctttcttctgcacttgcacaatcgctctagctctgagcttttccaagattcactggtttttgatatcacagttattacaattgactggatttcaaggcacctctactttgcactgaaagaatcacaaaatggaatgcaagtatttgatgttgatcttgaacacaaggtgaaatatcccagagaggtgaagattcacaataggaattcaacaataatttctttttctgtatatcctcttttaagtcgcttgtattggacagaagtttccaattttggctaccagatgttctactacagtattatcagtcacaccttgcaccgaattctgcaacccacagctacaaaccaacaaaacaaaaggaatcaatgttcttgtaatgtgactgaatttgagttaagtggagcaatggctattgatacctctaacctagagaaaccattgatatactttgccaaagcacaagagatctgggcaatggatctggaaggctgtcagtgttggagagttatcacagtacctgctatgctcgcaggaaaaacccttgttagcttaactgtggatggagatcttatatactggatcatcacagcaaaggacagcacacagatttatcaggcaaagaaaggaaatggggccatcgtttcccaggtgaaggccctaaggagtaggcatatcttggcttacagttcagttatgcagccttttccagataaagcgtttctgtctctagcttcagacactgtggaaccaactatacttaatgccactaacactagcctcacaatcagattacctctggccaagacaaacctcacatggtatggcatcaccagccctactccaacatacctggtttattatgcagaagttaatgacaggaaaaacagctctgacttgaaatatagaattctggaatttcaggacagtatagctcttattgaagatttacaaccattttcaacatacatgatacagatagctgtaaaaaattattattcagatcctttggaacatttaccaccaggaaaagagatttggggaaaaactaaaaatggagtaccagaggcagtgcagctcattaatacaactgtgcggtcagacaccagcctcattatatcttggagagaatctcacaagccaaatggacctaaagaatcagtccgttatcagttggcaatctcacacctggccctaattcctgaaactcctctaagacaaagtgaatttccaaatggaaggctcactctccttgttactagactgtctggtggaaatatttatgtgttaaaggttcttgcctgccactctgaggaaatgtggtgtacagagagtcatcctgtcactgtggaaatgtttaacacaccagagaaaccttattccttggttccagagaacactagtttgcaatttaattggaaggctccattgaatgttaacctcatcagattttgggttgagctacagaagtggaaatacaatgagttttaccatgttaaaacttcatgcagccaaggtcctgcttatgtctgtaatatcacaaatctacaaccttatacttcatataatgtcagagtagtggtggtttataagacgggagaaaatagcacctcacttccagaaagctttaagacaaaagctggagtcccaaataaaccaggcattcccaaattactagaagggagtaaaaattcaatacagtgggagaaagctgaagataatggatgtagaattacatactatatccttgagataagaaagagcacttcaaataatttacagaaccagaatttaaggtggaagatgacatttaatggatcctgcagtagtgtttgcacatggaagtccaaaaacctgaaaggaatatttcagttcagagtagtagctgcaaataatctagggtttggtgaatatagtggaatcagtgagaatattatattagttggagatgatttttggataccagaaacaagtttcatacttactattatagttggaatatttctggttgttacaatcccactgacctttgtctggcatagaagattaaagaatcaaaaaagtgccaaggaaggggtgacagtgcttataaacgaagacaaagagttggctgagctgcgaggtctggcagccggagtaggcctggctaatgcctgctatgcaatacatactcttccaacccaagaggagattgaaaatcttcctgccttccctcgggaaaaactgactctgcgtctcttgctgggaagtggagcctttggagaagtgtatgaaggaacagcagtggacatcttaggagttggaagtggagaaatcaaagtagcagtgaagactttgaagaagggttccacagaccaggagaagattgaattcctgaaggaggcacatctgatgagcaaatttaatcatcccaacattctgaagcagcttggagtttgtctgctgaatgaaccccaatacattatcctggaactgatggagggaggagaccttcttacttatttgcgtaaagcccggatggcaacgttttatggtcctttactcaccttggttgaccttgtagacctgtgtgtagatatttcaaaaggctgtgtctacttggaacggatgcatttcattcacagggatctggcagctagaaattgccttgtttccgtgaaagactataccagtccacggatagtgaagattggagactttggactcgccagagacatctataaaaatgattactatagaaagagaggggaaggcctgctcccagttcggtggatggctccagaaagtttgatggatggaatcttcactactcaatctgatgtatggtcttttggaattctgatttgggagattttaactcttggtcatcagccttatccagctcattccaaccttgatgtgttaaactatgtgcaaacaggagggagactggagccaccaagaaattgtcctgatgatctgtggaatttaatgacccagtgctgggctcaagaacccgaccaaagacctacttttcatagaattcaggaccaacttcagttattcagaaattttttcttaaatagcatttataagtccagagatgaagcaaacaacagtggagtcataaatgaaagctttgaaggtgaagatggcgatgtgatttgtttgaattcagatgacattatgccagttgctttaatggaaacgaagaaccgagaagggttaaactatatggtacttgctacagaatgtggccaaggtgaagaaaagtctgagggtcctctaggctcccaggaatctgaatcttgtggtctgaggaaagaagagaaggaaccacatgcagacaaagatttctgccaagaaaaacaagtggcttactgcccttctggcaagcctgaaggcctgaactatgcctgtctcactcacagtggatatggagatgggtctgattaa

SEQ ID NO: 763 - DNA, 7044 bp, Homo sapiens
atgaagaacatttactgtcttattccgaagcttgtcaattttgcaactcttggctgcctatggatttctgtggtgcagtgtacagttttaaatagctgcctaaagtcgtgtgtaactaatctgggccagcagcttgaccttggcacaccacataatctgagtgaaccgtgtatccaaggatgtcacttttggaactctgtagatcagaaaaactgtgctttaaagtgtcgggagtcgtgtgaggttggctgtagcagcgcggaaggtgcatatgaagaggaagtactggaaaatgcagacctaccaactgctccctttgcttcttccattggaagccacaatatgacattacgatggaaatctgcaaacttctctggagtaaaatacatcattcagtggaaatatgcacaacttctgggaagctggacttatactaagactgtgtccagaccgtcctatgtggtcaagcccctgcaccccttcactgagtacattttccgagtggtttggatcttcacagcgcagctgcagctctactcccctccaagtcccagttacaggactcatcctcatggagttcctgaaactgcacctttgattaggaatattgagagctcaagtcccgacactgtggaagtcagctgggatccacctcaattcccaggtggacctattttgggttataacttaaggctgatcagcaaaaatcaaaaattagatgcagggacacagagaaccagtttccagttttactccactttaccaaatactatctacaggttttctattgcagcagtaaatgaagttggtgagggtccagaagcagaatctagtattaccacttcatcttcagcagttcaacaagaggaacagtggctctttttatccagaaaaacttctctaagaaagagatctttaaaacatttagtagatgaagcacattgccttcggttggatgctatataccataatattacaggaatatctgttgatgtccaccagcaaattgtttatttctctgaaggaactctcatatgggcgaagaaggctgccaacatgtctgatgtatctgacctgagaattttttacagaggttcaggattaatttcttctatctccatagattggctttatcaaagaatgtatttcatcatggatgaactggtatgtgtctgtgatttagagaactgctcaaacatcgaggaaattactccaccctctattagtgcacctcaaaaaattgtggctgattcatacaatgggtatgtcttttacctcctgagagatggcatttatagagcagaccttcctgtaccatctggccggtgtgcagaagctgtgcgtattgtggagagttgcacgttaaaggactttgcaatcaagccacaagccaagcgaatcatttacttcaatgacactgcccaagtcttcatgtcaacatttctggatggctctgcttcccatctcatcctacctcgcatcccctttgctgatgtgaaaagttttgcttgtgaaaacaatgactttcttgtcacagatggcaaggtcattttccaacaggatgctttgtcttttaatgaattcatcgtgggatgtgacctgagtcacatagaagaatttgggtttggtaacttggtcatctttggctcatcctcccagctgcaccctctgccaggccgcccgcaggagctttcggtgctgtttggctctcaccaggctcttgttcaatggaagcctcctgcccttgccataggagccaatgtcatcctgatcagtgatattattgaactctttgaattaggcccttctgcctggcagaactggacctatgaggtgaaagtatccacccaagaccctcctgaagtcactcatattttcttgaacataagtggaaccatgctgaatgtacctgagctgcagagtgctatgaaatacaaggtttctgtgagagcaagttctccaaagaggccaggcccctggtcagagccctcagtgggtactaccctggtgccagctagtgaaccaccatttatcatggctgtgaaagaagatgggctttggagtaaaccattaaatagctttggcccaggagagttcttatcctctgatataggaaatgtgtcagacatggattggtataacaacagcctctactacagtgacacgaaaggcgacgtttttgtgtggctgctgaatgggacggatatctcagagaattatcacctacccagcattgcaggagcaggggctttagcttttgagtggctgggtcactttctctactgggctggaaagacatatgtgatacaaaggcagtctgtgttgacgggacacacagacattgttacccacgtgaagctattggtgaatgacatggtggtggattcagttggtggatatctctactggaccacactctattcagtggaaagcaccagactaaatggggaaagttcccttgtactacagacacagccttggttttctgggaaaaaggtaattgctctaactttagacctcagtgatgggctcctgtattggttggttcaagacagtcaatgtattcacctgtacacagctgttcttcggggacagagcactggggataccaccatcacagaatttgcagcctggagtacttctgaaatttcccagaatgcactgatgtactatagtggtcggctgttctggatcaatggctttaggattatcacaactcaagaaataggtcagaaaaccagtgtctctgttttggaaccagccagatttaatcagttcacaattattcagacatcccttaagcccctgccagggaacttttcctttacccctaaggttattccagattctgttcaagagtcttcatttaggattgaaggaaatgcttcaagttttcaaatcctgtggaatggtccccctgcggtagactggggtgtagttttctacagtgtagaatttagtgctcattctaagttcttggctagtgaacaacactctttacctgtatttactgtggaaggactggaaccttatgccttatttaatctttctgtcactccttatacctactggggaaagggccccaaaacatctctgtcacttcgagcacctgaaacagttccatcagcaccagagaaccccagaatatttatattaccaagtggaaaatgctgcaacaagaatgaagttgtggtggaatttaggtggaacaaacctaagcatgaaaatggggtgttaacaaaatttgaaattttctacaatatatccaatcaaagtattacaaacaaaacatgtgaagactggattgctgtcaatgtcactcccttagtgatgtcttttcaacttgaaggcatgagtcccagatgctttattgccttccaggttagggcctttacatctaaggggccaggaccatatgctgacgttgtaaagtctacaacatcagaaatcaacccatttcctcacctcataactcttcttggtaacaagatagtttttttagatatggatcaaaatcaagttgtgtggacgttttcagcagaaagagttatcagtgccgtttgctacacagctgataatgagatgggatattatgctgaaggggactcactctttcttctgcacttgcacaatcgctctagctctgagcttttccaagattcactggtttttgatatcacagttattacaattgactggatttcaaggcacctctactttgcactgaaagaatcacaaaatggaatgcaagtatttgatgttgatcttgaacacaaggtgaaatatcccagagaggtgaagattcacaataggaattcaacaataatttctttttctgtatatcctcttttaagtcgcttgtattggacagaagtttccaattttggctaccagatgttctactacagtattatcagtcacaccttgcaccgaattctgcaacccacagctacaaaccaacaaaacaaaaggaatcaatgttcttgtaatgtgactgaatttgagttaagtggagcaatggctattgatacctctaacctagagaaaccattgatatactttgccaaagcacaagagatctgggcaatggatctggaaggctgtcagtgttggagagttatcacagtacctgctatgctcgcaggaaaaacccttgttagcttaactgtggatggagatcttatatactggatcatcacagcaaaggacagcacacagatttatcaggcaaagaaaggaaatggggccatcgtttcccaggtgaaggccctaaggagtaggcatatcttggcttacagttcagttatgcagccttttccagataaagcgtttctgtctctagcttcagacactgtggaaccaactatacttaatgccactaacactagcctcacaatcagattacctctggccaagacaaacctcacatggtatggcatcaccagccctactccaacatacctggtttattatgcagaagttaatgacaggaaaaacagctctgacttgaaatatagaattctggaatttcaggacagtatagctcttattgaagatttacaaccattttcaacatacatgatacagatagctgtaaaaaattattattcagatcctttggaacatttaccaccaggaaaagagatttggggaaaaactaaaaatggagtaccagaggcagtgcagctcattaatacaactgtgcggtcagacaccagcctcattatatcttggagagaatctcacaagccaaatggacctaaagaatcagtccgttatcagttggcaatctcacacctggccctaattcctgaaactcctctaagacaaagtgaatttccaaatggaaggctcactctccttgttactagactgtctggtggaaatatttatgtgttaaaggttcttgcctgccactctgaggaaatgtggtgtacagagagtcatcctgtcactgtggaaatgtttaacacaccagagaaaccttattccttggttccagagaacactagtttgcaatttaattggaaggctccattgaatgttaacctcatcagattttgggttgagctacagaagtggaaatacaatgagttttaccatgttaaaacttcatgcagccaaggtcctgcttatgtctgtaatatcacaaatctacaaccttatacttcatataatgtcagagtagtggtggtttataagacgggagaaaatagcacctcacttccagaaagctttaagacaaaagctggagtcccaaataaaccaggcattcccaaattactagaagggagtaaaaattcaatacagtgggagaaagctgaagataatggatgtagaattacatactatatccttgagataagaaagagcacttcaaataatttacagaaccagaatttaaggtggaagatgacatttaatggatcctgcagtagtgtttgcacatggaagtccaaaaacctgaaaggaatatttcagttcagagtagtagctgcaaataatctagggtttggtgaatatagtggaatcagtgagaatattatattagttggagatgatttttggataccagaaacaagtttcatacttactattatagttggaatatttctggttgttacaatcccactgacctttgtctggcatagaagattaaagaatcaaaaaagtgccaaggaaggggtgacagtgcttataaacgaagacaaagagttggctgagctgcgaggtctggcagccggagtaggcctggctaatgcctgctatgcaatacatactcttccaacccaagaggagattgaaaatcttcctgccttccctcgggaaaaactgactctgcgtctcttgctgggaagtggagcctttggagaagtgtatgaaggaacagcagtggacatcttaggagttggaagtggagaaatcaaagtagcagtgaagactttgaagaagggttccacagaccaggagaagattgaattcctgaaggaggcacatctgatgagcaaatttaatcatcccaacattctgaagcagcttggagtttgtctgctgaatgaaccccaatacattatcctggaactgatggagggaggagaccttcttacttatttgcgtaaagcccggatggcaacgttttatggtcctttactcaccttggttgaccttgtagacctgtgtgtagatatttcaaaaggctgtgtctacttggaacggatgcatttcattcacagggatctggcagctagaaattgccttgtttccgtgaaagactataccagtccacggatagtgaagattggagactttggactcgccagagacatctataaaaatgattactatagaaagagaggggaaggcctgctcccagttcggtggatggctccagaaagtttgatggatggaatcttcactactcaatctgatgtatggtcttttggaattctgatttgggagattttaactcttggtcatcagccttatccagctcattccaaccttgatgtgttaaactatgtgcaaacaggagggagactggagccaccaagaaattgtcctgatgatctgtggaatttaatgacccagtgctgggctcaagaacccgaccaaagacctacttttcatagaattcaggaccaacttcagttattcagaaattttttcttaaatagcatttataagtccagagatgaagcaaacaacagtggagtcataaatgaaagctttgaaggtgaagatggcgatgtgatttgtttgaattcagatgacattatgccagttgctttaatggaaacgaagaaccgagaagggttaaactatatggtacttgctacagaatgtggccaaggtgaagaaaagtctgagggtcctctaggctcccaggaatctgaatcttgtggtctgaggaaagaagagaaggaaccacatgcagacaaagatttctgccaagaaaaacaagtggcttactgcccttctggcaagcctgaaggcctgaactatgcctgtctcactcacagtggatatggagatgggtctgattaa

SEQ ID NO: 764 - DNA, 7044 bp, Homo sapiens
atgaagaacatttactgtcttattccgaagcttgtcaattttgcaactcttggctgcctatggatttctgtggtgcagtgtacagttttaaatagctgcctaaagtcgtgtgtaactaatctgggccagcagcttgaccttggcacaccacataatctgagtgaaccgtgtatccaaggatgtcacttttggaactctgtagatcagaaaaactgtgctttaaagtgtcgggagtcgtgtgaggttggctgtagcagcgcggaaggtgcatatgaagaggaagtactggaaaatgcagacctaccaactgctccctttgcttcttccattggaagccacaatatgacattacgatggaaatctgcaaacttctctggagtaaaatacatcattcagtggaaatatgcacaacttctgggaagctggacttatactaagactgtgtccagaccgtcctatgtggtcaagcccctgcaccccttcactgagtacattttccgagtggtttggatcttcacagcgcagctgcagctctactcccctccaagtcccagttacaggactcatcctcatggagttcctgaaactgcacctttgattaggaatattgagagctcaagtcccgacactgtggaagtcagctgggatccacctcaattcccaggtggacctattttgggttataacttaaggctgatcagcaaaaatcaaaaattagatgcagggacacagagaaccagtttccagttttactccactttaccaaatactatctacaggttttctattgcagcagtaaatgaagttggtgagggtccagaagcagaatctagtattaccacttcatcttcagcagttcaacaagaggaacagtggctctttttatccagaaaaacttctctaagaaagagatctttaaaacatttagtagatgaagcacattgccttcggttggatgctatataccataatattacaggaatatctgttgatgtccaccagcaaattgtttatttctctgaaggaactctcatatgggcgaagaaggctgccaacatgtctgatgtatctgacctgagaattttttacagaggttcaggattaatttcttctatctccatagattggctttatcaaagaatgtatttcatcatggatgaactggtatgtgtctgtgatttagagaactgctcaaacatcgaggaaattactccaccctctattagtgcacctcaaaaaattgtggctgattcatacaatgggtatgtcttttacctcctgagagatggcatttatagagcagaccttcctgtaccatctggccggtgtgcagaagctgtgcgtattgtggagagttgcacgttaaaggactttgcaatcaagccacaagccaagcgaatcatttacttcaatgacactgcccaagtcttcatgtcaacatttctggatggctctgcttcccatctcatcctacctcgcatcccctttgctgatgtgaaaagttttgcttgtgaaaacaatgactttcttgtcacagatggcaaggtcattttccaacaggatgctttgtcttttaatgaattcatcgtgggatgtgacctgagtcacatagaagaatttgggtttggtaacttggtcatctttggctcatcctcccagctgcaccctctgccaggccgcccgcaggagctttcggtgctgtttggctctcaccaggctcttgttcaatggaagcctcctgcccttgccataggagccaatgtcatcctgatcagtgatattattgaactctttgaattaggcccttctgcctggcagaactggacctatgaggtgaaagtatccacccaagaccctcctgaagtcactcatattttcttgaacataagtggaaccatgctgaatgtacctgagctgcagagtgctatgaaatacaaggtttctgtgagagcaagttctccaaagaggccaggcccctggtcagagccctcagtgggtactaccctggtgccagctagtgaaccaccatttatcatggctgtgaaagaagatgggctttggagtaaaccattaaatagctttggcccaggagagttcttatcctctgatataggaaatgtgtcagacatggattggtataacaacagcctctactacagtgacacgaaaggcgacgtttttgtgtggctgctgaatgggacggatatctcagagaattatcacctacccagcattgcaggagcaggggctttagcttttgagtggctgggtcactttctctactgggctggaaagacatatgtgatacaaaggcagtctgtgttgacgggacacacagacattgttacccacgtgaagctattggtgaatgacatggtggtggattcagttggtggatatctctactggaccacactctattcagtggaaagcaccagactaaatggggaaagttcccttgtactacagacacagccttggttttctgggaaaaaggtaattgctctaactttagacctcagtgatgggctcctgtattggttggttcaagacagtcaatgtattcacctgtacacagctgttcttcggggacagagcactggggataccaccatcacagaatttgcagcctggagtacttctgaaatttcccagaatgcactgatgtactatagtggtcggctgttctggatcaatggctttaggattatcacaactcaagaaataggtcagaaaaccagtgtctctgttttggaaccagccagatttaatcagttcacaattattcagacatcccttaagcccctgccagggaacttttcctttacccctaaggttattccagattctgttcaagagtcttcatttaggattgaaggaaatgcttcaagttttcaaatcctgtggaatggtccccctgcggtagactggggtgtagttttctacagtgtagaatttagtgctcattctaagttcttggctagtgaacaacactctttacctgtatttactgtggaaggactggaaccttatgccttatttaatctttctgtcactccttatacctactggggaaagggccccaaaacatctctgtcacttcgagcacctgaaacagttccatcagcaccagagaaccccagaatatttatattaccaagtggaaaatgctgcaacaagaatgaagttgtggtggaatttaggtggaacaaacctaagcatgaaaatggggtgttaacaaaatttgaaattttctacaatatatccaatcaaagtattacaaacaaaacatgtgaagactggattgctgtcaatgtcactccctcagtgatgtcttttcaacttgaaggcatgagtcccagatgctttattgccttccaggttagggcctttacatctaaggggccaggaccatatgctgacgttgtaaagtctacaacatcagaaatcaacccatttcctcacctcataactcttcttggtaacaagatagtttttttagatatggatcaaaatcaagttgtgtggacgttttcagcagaaagagttatcagtgccgtttgctacacagctgataatgagatgggatattatgctgaaggggactcactctttcttctgcacttgcacaatcgctctagctctgagcttttccaagattcactggtttttgatatcacagttattacaattgactggatttcaaggcacctctactttgcactgaaagaatcacaaaatggaatgcaagtatttgatgttgatcttgaacacaaggtgaaatatcccagagaggtgaagattcacaataggaattcaacaataatttctttttctgtatatcctcttttaagtcgcttgtattggacagaagtttccaattttggctaccagatgttctactacagtattatcagtcacaccttgcaccgaattctgcaacccacagctacaaaccaacaaaacaaaaggaatcaatgttcttgtaatgtgactgaatttgagttaagtggagcaatggctattgatacctctaacctagagaaaccattgatatactttgccaaagcacaagagatctgggcaatggatctggaaggctgtcagtgttggagagttatcacagtacctgctatgctcgcaggaaaaacccttgttagcttaactgtggatggagatcttatatactggatcatcacagcaaaggacagcacacagatttatcaggcaaagaaaggaaatggggccatcgtttcccaggtgaaggccctaaggagtaggcatatcttggcttacagttcagttatgcagccttttccagataaagcgtttctgtctctagcttcagacactgtggaaccaactatacttaatgccactaacactagcctcacaatcagattacctctggccaagacaaacctcacatggtatggcatcaccagccctactccaacatacctggtttattatgcagaagttaatgacaggaaaaacagctctgacttgaaatatagaattctggaatttcaggacagtatagctcttattgaagatttacaaccattttcaacatacatgatacagatagctgtaaaaaattattattcagatcctttggaacatttaccaccaggaaaagagatttggggaaaaactaaaaatggagtaccagaggcagtgcagctcattaatacaactgtgcggtcagacaccagcctcattatatcttggagagaatctcacaagccaaatggacctaaagaatcagtccgttatcagttggcaatctcacacctggccctaattcctgaaactcctctaagacaaagtgaatttccaaatggaaggctcactctccttgttactagactgtctggtggaaatatttatgtgttaaaggttcttgcctgccactctgaggaaatgtggtgtacagagagtcatcctgtcactgtggaaatgtttaacacaccagagaaaccttattccttggttccagagaacactagtttgcaatttaattggaaggctccattgaatgttaacctcatcagattttgggttgagctacagaagtggaaatacaatgagttttaccatgttaaaacttcatgcagccaaggtcctgcttatgtctgtaatatcacaaatctacaaccttatacttcatataatgtcagagtagtggtggtttataagacgggagaaaatagcacctcacttccagaaagctttaagacaaaagctggagtcccaaataaaccaggcattcccaaattactagaagggagtaaaaattcaatacagtgggagaaagctgaagataatggatgtagaattacatactatatccttgagataagaaagagcacttcaaataatttacagaaccagaatttaaggtggaagatgacatttaatggatcctgcagtagtgtttgcacatggaagtccaaaaacctgaaaggaatatttcagttcagagtagtagctgcaaataatctagggtttggtgaatatagtggaatcagtgagaatattatattagttggagatgatttttggataccagaaacaagtttcatacttactattatagttggaatatttctggttgttacaatcccactgacctttgtctggcatagaagattaaagaatcaaaaaagtgccaaggaaggggtgacagtgcttataaacgaagacaaagagttggctgagctgcgaggtctggcagccggagtaggcctggctaatgcctgctatgcaatacatactcttccaacccaagaggagattgaaaatcttcctgccttccctcgggaaaaactgactctgcgtctcttgctgggaagtggagcctttggagaagtgtatgaaggaacagcagtggacatcttaggagttggaagtggagaaatcaaagtagcagtgaagactttgaagaagggttccacagaccaggagaagattgaattcctgaaggaggcacatctgatgagcaaatttaatcatcccaacattctgaagcagcttggagtttgtctgctgaatgaaccccaatacattatcctggaactgatggagggaggagaccttcttacttatttgcgtaaagcccggatggcaacgttttatggtcctttactcaccttggttgaccttgtagacctgtgtgtagatatttcaaaaggctgtgtctacttggaacggatgcatttcattcacagggatctggcagctagaaattgccttgtttccgtgaaagactataccagtccacggatagtgaagattggagactttggactcgccagagacatctataaaaatgattactatagaaagagaggggaaggcctgctcccagttcggtggatggctccagaaagtttgatggatggaatcttcactactcaatctgatgtatggtcttttggaattctgatttgggagattttaactcttggtcatcagccttatccagctcattccaaccttgatgtgttaaactatgtgcaaacaggagggagactggagccaccaagaaattgtcctgatgatctgtggaatttaatgacccagtgctgggctcaagaacccgaccaaagacctacttttcatagaattcagaaccaacttcagttattcagaaattttttcttaaatagcatttataagtccagagatgaagcaaacaacagtggagtcataaatgaaagctttgaaggtgaagatggcgatgtgatttgtttgaattcagatgacattatgccagttgctttaatggaaacgaagaaccgagaagggttaaactatatggtacttgctacagaatgtggccaaggtgaagaaaagtctgagggtcctctaggctcccaggaatctgaatcttgtggtctgaggaaagaagagaaggaaccacatgcagacaaagatttctgccaagaaaaacaagtggcttactgcccttctggcaagcctgaaggcctgaactatgcctgtctcactcacagtggatatggagatgggtctgattaa

SEQ ID NO: 765 - DNA, 7044 bp, Homo sapiens
atgaagaacatttactgtcttattccgaagcttgtcaattttgcaactcttggctgcctatggatttctgtggtgcagtgtacagttttaaatagctgcctaaagtcgtgtgtaactaatctgggccagcagcttgaccttggcacaccacataatctgagtgaaccgtgtatccaaggatgtcacttttggaactctgtagatcagaaaaactgtgctttaaagtgtcgggagtcgtgtgaggttggctgtagcagcgcggaaggtgcatatgaagaggaagtactggaaaatgcagacctaccaactgctccctttgcttcttccattggaagccacaatatgacattacgatggaaatctgcaaacttctctggagtaaaatacatcattcagtggaaatatgcacaacttctgggaagctggacttatactaagactgtgtccagaccgtcctatgtggtcaagcccctgcaccccttcactgagtacattttccgagtggtttggatcttcacagcgcagctgcagctctactcccctccaagtcccagttacaggactcatcctcatggagttcctgaaactgcacctttgattaggaatattgagagctcaagtcccgacactgtggaagtcagctgggatccacctcaattcccaggtggacctattttgggttataacttaaggctgatcagcaaaaatcaaaaattagatgcagggacacagagaaccagtttccagttttactccactttaccaaatactatctacaggttttctattgcagcagtaaatgaagttggtgagggtccagaagcagaatctagtattaccacttcatcttcagcagttcaacaagaggaacagtggctctttttatccagaaaaacttctctaagaaagagatctttaaaacatttagtagatgaagcacattgccttcggttggatgctatataccataatattacaggaatatctgttgatgtccaccagcaaattgtttatttctctgaaggaactctcatatgggcgaagaaggctgccaacatgtctgatgtatctgacctgagaattttttacagaggttcaggattaatttcttctatctccatagattggctttatcaaagaatgtatttcatcatggatgaactggtatgtgtctgtgatttagagaactgctcaaacatcgaggaaattactccaccctctattagtgcacctcaaaaaattgtggctgattcatacaatgggtatgtcttttacctcctgagagatggcatttatagagcagaccttcctgtaccatctggccggtgtgcagaagctgtgcgtattgtggagagttgcacgttaaaggactttgcaatcaagccacaagccaagcgaatcatttacttcaatgacactgcccaagtcttcatgtcaacatttctggatggctctgcttcccatctcatcctacctcgcatcccctttgctgatgtgaaaagttttgcttgtgaaaacaatgactttcttgtcacagatggcaaggtcattttccaacaggatgctttgtcttttaatgaattcatcgtgggatgtgacctgagtcacatagaagaatttgggtttggtaacttggtcatctttggctcatcctcccagctgcaccctctgccaggccgcccgcaggagctttcggtgctgtttggctctcaccaggctcttgttcaatggaagcctcctgcccttgccataggagccaatgtcatcctgatcagtgatattattgaactctttgaattaggcccttctgcctggcagaactggacctatgaggtgaaagtatccacccaagaccctcctgaagtcactcatattttcttgaacataagtggaaccatgctgaatgtacctgagctgcagagtgctatgaaatacaaggtttctgtgagagcaagttctccaaagaggccaggcccctggtcagagccctcagtgggtactaccctggtgccagctagtgaaccaccatttatcatggctgtgaaagaagatgggctttggagtaaaccattaaatagctttggcccaggagagttcttatcctctgatataggaaatgtgtcagacatggattggtataacaacagcctctactacagtgacacgaaaggcgacgtttttgtgtggctgctgaatgggacggatatctcagagaattatcacctacccagcattgcaggagcaggggctttagcttttgagtggctgggtcactttctctactgggctggaaagacatatgtgatacaaaggcagtctgtgttgacgggacacacagacattgttacccacgtgaagctattggtgaatgacatggtggtggattcagttggtggatatctctactggaccacactctattcagtggaaagcaccagactaaatggggaaagttcccttgtactacagacacagccttggttttctgggaaaaaggtaattgctctaactttagacctcagtgatgggctcctgtattggttggttcaagacagtcaatgtattcacctgtacacagctgttcttcggggacagagcactggggataccaccatcacagaatttgcagcctggagtacttctgaaatttcccagaatgcactgatgtactatagtggtcggctgttctggatcaatggctttaggattatcacaactcaagaaataggtcagaaaaccagtgtctctgttttggaaccagccagatttaatcagttcacaattattcagacatcccttaagcccctgccagggaacttttcctttacccctaaggttattccagattctgttcaagagtcttcatttaggattgaaggaaatgcttcaagttttcaaatcctgtggaatggtccccctgcggtagactggggtgtagttttctacagtgtagaatttagtgctcattctaagttcttggctagtgaacaacactctttacctgtatttactgtggaaggactggaaccttatgccttatttaatctttctgtcactccttatacctactggggaaagggccccaaaacatctctgtcacttcgagcacctgaaacagttccatcagcaccagagaaccccagaatatttatattaccaagtggaaaatgctgcaacaagaatgaagttgtggtggaatttaggtggaacaaacctaagcatgaaaatggggtgttaacaaaatttgaaattttctacaatatatccaatcaaagtattacaaacaaaacatgtgaagactggattgctgtcaatgtcactccctcagtgatgtcttttcaacttgaaggcatgagtcccagatgctttattgccttccaggttagggcctttacatctaaggggccaggaccatatgctgacgttgtaaagtctacaacatcagaaatcaacccatttcctcacctcataactcttcttggtaacaagatagtttttttagatatggatcaaaatcaagttgtgtggacgttttcagcagaaagagttatcagtgccgtttgctacacagctgataatgagatgggatattatgctgaaggggactcactctttcttctgcacttgcacaatcgctctagctctgagcttttccaagattcactggtttttgatatcacagttattacaattgactggatttcaaggcacctctactttgcactgaaagaatcacaaaatggaatgcaagtatttgatgttgatcttgaacacaaggtgaaatatcccagagaggtgaagattcacaataggaattcaacaataatttctttttctgtatatcctcttttaagtcgcttgtattggacagaagtttccaattttggctaccagatgttctactacagtattatcagtcacaccttgcaccgaattctgcaacccacagctacaaaccaacaaaacaaaaggaatcaatgttcttgtaatgtgactgaatttgagttaagtggagcaatggctattgatacctctaacctagagaaaccattgatatactttgccaaagcacaagagatctgggcaatggatctggaaggctgtcagtgttggagagttatcacagtacctgctatgctcgcaggaaaaacccttgttagcttaactgtggatggagatcttatatactggatcatcacagcaaaggacagcacacagatttatcaggcaaagaaaggaaatggggccatcgtttcccaggtgaaggccctaaggagtaggcatatcttggcttacagttcagttatgcagccttttccagataaagcgtttctgtctctagcttcagacactgtggaaccaactatacttaatgccactaacactagcctcacaatcagattacctctggccaagacaaacctcacatggtatggcatcaccagccctactccaacatacctggtttattatgcagaagttaatgacaggaaaaacagctctgacttgaaatatagaattctggaatttcaggacagtatagctcttattgaagatttacaaccattttcaacatacatgatacagatagctgtaaaaaattattattcagatcctttggaacatttaccaccaggaaaagagatttggggaaaaactaaaaatggagtaccagaggcagtgcagctcattaatacaactgtgcggtcagacaccagcctcattatatcttggagagaatctcacaagccaaatggacctaaagaatcagtccgttatcagttggcaatctcacacctggccctaattcctgaaactcctctaagacaaagtgaatttccaaatggaaggctcactctccttgttactagactgtctggtggaaatatttatgtgttaaaggttcttgcctgccactctgaggaaatgtggtgtacagagagtcatcctgtcactgtggaaatgtttaacacaccagagaaaccttattccttggttccagagaacactagtttgcaatttaattggaaggctccattgaatgttaacctcatcagattttgggttgagctacagaagtggaaatacaatgagttttaccatgttaaaacttcatgcagccaaggtcctgcttatgtctgtaatatcacaaatctacaaccttatacttcatataatgtcagagtagtggtggtttataagacgggagaaaatagcacctcacttccagaaagctttaagacaaaagctggagtcccaaataaaccaggcattcccaaattactagaagggagtaaaaattcaatacagtgggagaaagctgaagataatggatgtagaattacatactatatccttgagataagaaagagcacttcaaataatttacagaaccagaatttaaggtggaagatgacatttaatggatcctgcagtagtgtttgcacatggaagtccaaaaacctgaaaggaatatttcagttcagagtagtagctgcaaataatctagggtttggtgaatatagtggaatcagtgagaatattatattagttggagatgatttttggataccagaaacaagtttcatacttactattatagttggaatatttctggttgttacaatcccactgacctttgtctggcatagaagattaaagaatcaaaaaagtgccaaggaaggggtgacagtgcttataaacgaagacaaagagttggctgagctgcgaggtctggcagccggagtaggcctggctaatgcctgctatgcaatacatactcttccaacccaagaggagattgaaaatcttcctgccttccctcgggaaaaactgactctgcgtctcttgctgggaagtggagcctttggagaagtgtatgaaggaacagcagtggacatcttaggagttggaagtggagaaatcaaagtagcagtgaagactttgaagaagggttccacagaccaggagaagattgaattcctgaaggaggcacatctgatgagcaaatttaatcatcccaacattctgaagcagcttggagtttgtctgctgaatgaaccccaatacattatcctggaactgatggagggaggagaccttcttacttatttgcgtaaagcccggatggcaacgttttatggtcctttactcaccttggttgaccttgtagacctgtgtgtagatatttcaaaaggctgtgtctacttggaacggatgcatttcattcacagggatctggcagctagaaattgccttgtttccgtgaaagactataccagtccacggatagtgaagattggagactttggactcgccagagacatctataaaaatgattactatagaaagagaggggaaggcctgctcccagttcggtggatggctccagaaagtttgatggatggaatcttcactactcaatctgatgtatggtcttttggaattctgatttgggagattttaactcttggtcatcagccttatccagctcattccaaccttgatgtgttaaactatgtgcaaacaggagggagactggagccaccaagaaattgtcctgatgatctgtggaatttaatgacccagtgctgggctcaagaacccgaccaaagacctacttttcatagaattcaggaccaacttcagttattcagaaattttttcttaaatagcatttatcagtccagagatgaagcaaacaacagtggagtcataaatgaaagctttgaaggtgaagatggcgatgtgatttgtttgaattcagatgacattatgccagttgctttaatggaaacgaagaaccgagaagggttaaactatatggtacttgctacagaatgtggccaaggtgaagaaaagtctgagggtcctctaggctcccaggaatctgaatcttgtggtctgaggaaagaagagaaggaaccacatgcagacaaagatttctgccaagaaaaacaagtggcttactgcccttctggcaagcctgaaggcctgaactatgcctgtctcactcacagtggatatggagatgggtctgattaa

SEQ ID NO: 766 - DNA, 7044 bp, Homo sapiens
atgaagaacatttactgtcttattccgaagcttgtcaattttgcaactcttggctgcctatggatttctgtggtgcagtgtacagttttaaatagctgcctaaagtcgtgtgtaactaatctgggccagcagcttgaccttggcacaccacataatctgagtgaaccgtgtatccaaggatgtcacttttggaactctgtagatcagaaaaactgtgctttaaagtgtcgggagtcgtgtgaggttggctgtagcagcgcggaaggtgcatatgaagaggaagtactggaaaatgcagacctaccaactgctccctttgcttcttccattggaagccacaatatgacattacgatggaaatctgcaaacttctctggagtaaaatacatcattcagtggaaatatgcacaacttctgggaagctggacttatactaagactgtgtccagaccgtcctatgtggtcaagcccctgcaccccttcactgagtacattttccgagtggtttggatcttcacagcgcagctgcagctctactcccctccaagtcccagttacaggactcatcctcatggagttcctgaaactgcacctttgattaggaatattgagagctcaagtcccgacactgtggaagtcagctgggatccacctcaattcccaggtggacctattttgggttataacttaaggctgatcagcaaaaatcaaaaattagatgcagggacacagagaaccagtttccagttttactccactttaccaaatactatctacaggttttctattgcagcagtaaatgaagttggtgagggtccagaagcagaatctagtattaccacttcatcttcagcagttcaacaagaggaacagtggctctttttatccagaaaaacttctctaagaaagagatctttaaaacatttagtagatgaagcacattgccttcggttggatgctatataccataatattacaggaatatctgttgatgtccaccagcaaattgtttatttctctgaaggaactctcatatgggcgaagaaggctgccaacatgtctgatgtatctgacctgagaattttttacagaggttcaggattaatttcttctatctccatagattggctttatcaaagaatgtatttcatcatggatgaactggtatgtgtctgtgatttagagaactgctcaaacatcgaggaaattactccaccctctattagtgcacctcaaaaaattgtggctgattcatacaatgggtatgtcttttacctcctgagagatggcatttatagagcagaccttcctgtaccatctggccggtgtgcagaagctgtgcgtattgtggagagttgcacgttaaaggactttgcaatcaagccacaagccaagcgaatcatttacttcaatgacactgcccaagtcttcatgtcaacatttctggatggctctgcttcccatctcatcctacctcgcatcccctttgctgatgtgaaaagttttgcttgtgaaaacaatgactttcttgtcacagatggcaaggtcattttccaacaggatgctttgtcttttaatgaattcatcgtgggatgtgacctgagtcacatagaagaatttgggtttggtaacttggtcatctttggctcatcctcccagctgcaccctctgccaggccgcccgcaggagctttcggtgctgtttggctctcaccaggctcttgttcaatggaagcctcctgcccttgccataggagccaatgtcatcctgatcagtgatattattgaactctttgaattaggcccttctgcctggcagaactggacctatgaggtgaaagtatccacccaagaccctcctgaagtcactcatattttcttgaacataagtggaaccatgctgaatgtacctgagctgcagagtgctatgaaatacaaggtttctgtgagagcaagttctccaaagaggccaggcccctggtcagagccctcagtgggtactaccctggtgccagctagtgaaccaccatttatcatggctgtgaaagaagatgggctttggagtaaaccattaaatagctttggcccaggagagttcttatcctctgatataggaaatgtgtcagacatggattggtataacaacagcctctactacagtgacacgaaaggcgacgtttttgtgtggctgctgaatgggacggatatctcagagaattatcacctacccagcattgcaggagcaggggctttagcttttgagtggctgggtcactttctctactgggctggaaagacatatgtgatacaaaggcagtctgtgttgacgggacacacagacattgttacccacgtgaagctattggtgaatgacatggtggtggattcagttggtggatatctctactggaccacactctattcagtggaaagcaccagactaaatggggaaagttcccttgtactacagacacagccttggttttctgggaaaaaggtaattgctctaactttagacctcagtgatgggctcctgtattggttggttcaagacagtcaatgtattcacctgtacacagctgttcttcggggacagagcactggggataccaccatcacagaatttgcagcctggagtacttctgaaatttcccagaatgcactgatgtactatagtggtcggctgttctggatcaatggctttaggattatcacaactcaagaaataggtcagaaaaccagtgtctctgttttggaaccagccagatttaatcagttcacaattattcagacatcccttaagcccctgccagggaacttttcctttacccctaaggttattccagattctgttcaagagtcttcatttaggattgaaggaaatgcttcaagttttcaaatcctgtggaatggtccccctgcggtagactggggtgtagttttctacagtgtagaatttagtgctcattctaagttcttggctagtgaacaacactctttacctgtatttactgtggaaggactggaaccttatgccttatttaatctttctgtcactccttatacctactggggaaagggccccaaaacatctctgtcacttcgagcacctgaaacagttccatcagcaccagagaaccccagaatatttatattaccaagtggaaaatgctgcaacaagaatgaagttgtggtggaatttaggtggaacaaacctaagcatgaaaatggggtgttaacaaaatttgaaattttctacaatatatccaatcaaagtattacaaacaaaacatgtgaagactggattgctgtcaatgtcactccctcagtgatgtcttttcaacttgaaggcatgagtcccagatgctttattgccttccaggttagggcctttacatctaaggggccaggaccatatgctgacgttgtaaagtctacaacatcagaaatcaacccatttcctcacctcataactcttcttggtaacaagatagtttttttagatatggatcaaaatcaagttgtgtggacgttttcagcagaaagagttatcagtgccgtttgctacacagctgataatgagatgggatattatgctgaaggggactcactctttcttctgcacttgcacaatcgctctagctctgagcttttccaagattcactggtttttgatatcacagttattacaattgactggatttcaaggcacctctactttgcactgaaagaatcacaaaatggaatgcaagtatttgatgttgatcttgaacacaaggtgaaatatcccagagaggtgaagattcacaataggaattcaacaataatttctttttctgtatatcctcttttaagtcgcttgtattggacagaagtttccaattttggctaccagatgttctactacagtattatcagtcacaccttgcaccgaattctgcaacccacagctacaaaccaacaaaacaaaaggaatcaatgttcttgtaatgtgactgaatttgagttaagtggagcaatggctattgatacctctaacctagagaaaccattgatatactttgccaaagcacaagagatctgggcaatggatctggaaggctgtcagtgttggagagttatcacagtacctgctatgctcgcaggaaaaacccttgttagcttaactgtggatggagatcttatatactggatcatcacagcaaaggacagcacacagatttatcaggcaaagaaaggaaatggggccatcgtttcccaggtgaaggccctaaggagtaggcatatcttggcttacagttcagttatgcagccttttccagataaagcgtttctgtctctagcttcagacactgtggaaccaactatacttaatgccactaacactagcctcacaatcagattacctctggccaagacaaacctcacatggtatggcatcaccagccctactccaacatacctggtttattatgcagaagttaatgacaggaaaaacagctctgacttgaaatatagaattctggaatttcaggacagtatagctcttattgaagatttacaaccattttcaacatacatgatacagatagctgtaaaaaattattattcagatcctttggaacatttaccaccaggaaaagagatttggggaaaaactaaaaatggagtaccagaggcagtgcagctcattaatacaactgtgcggtcagacaccagcctcattatatcttggagagaatctcacaagccaaatggacctaaagaatcagtccgttatcagttggcaatctcacacctggccctaattcctgaaactcctctaagacaaagtgaatttccaaatggaaggctcactctccttgttactagactgtctggtggaaatatttatgtgttaaaggttcttgcctgccactctgaggaaatgtggtgtacagagagtcatcctgtcactgtggaaatgtttaacacaccagagaaaccttattccttggttccagagaacactagtttgcaatttaattggaaggctccattgaatgttaacctcatcagattttgggttgagctacagaagtggaaatacaatgagttttaccatgttaaaacttcatgcagccaaggtcctgcttatgtctgtaatatcacaaatctacaaccttatacttcatataatgtcagagtagtggtggtttataagacgggagaaaatagcacctcacttccagaaagctttaagacaaaagctggagtcccaaataaaccaggcattcccaaattactagaagggagtaaaaattcaatacagtgggagaaagctgaagataatggatgtagaattacatactatatccttgagataagaaagagcacttcaaataatttacagaaccagaatttaaggtggaagatgacatttaatggatcctgcagtagtgtttgcacatggaagtccaaaaacctgaaaggaatatttcagttcagagtagtagctgcaaataatctagggtttggtgaatatagtggaatcagtgagaatattatattagttggagatgatttttggataccagaaacaagtttcatacttactattatagttggaatatttctggttgttacaatcccactgacctttgtctggcatagaagattaaagaatcaaaaaagtgccaaggaaggggtgacagtgcttataaacgaagacaaagagttggctgagctgcgaggtctggcagccggagtaggcctggctaatgcctgctatgcaatacatactcttccaacccaagaggagattgaaaatcttcctgccttccctcgggaaaaactgactctgcgtctcttgctgggaagtggagcctttggagaagtgtatgaaggaacagcagtggacatcttaggagttggaagtggagaaatcaaagtagcagtgaagactttgaagaagggttccacagaccaggagaagattgaattcctgaaggaggcacatctgatgagcaaatttaatcatcccaacattctgaagcagcttggagtttgtctgctgaatgaaccccaatacattatcctggaactgatggagggaggagaccttcttacttatttgcgtaaagcccggatggcaacgttttatggtcctttactcaccttggttgaccttgtagacctgtgtgtagatatttcaaaaggctgtgtctacttggaacggatgcatttcattcacagggatctggcagctagaaattgccttgtttccgtgaaagactataccagtccacggatagtgaagattggagactttggactcgccagagacatctataaaaatgattactatagaaagagaggggaaggcctgctcccagttcggtggatggctccagaaagtttgatggatggaatcttcactactcaatctgatgtatggtcttttggaattctgatttgggagattttaactcttggtcatcagccttatccagctcattccaaccttgatgtgttaaactatgtgcaaacaggagggagactggagccaccaagaaattgtcctgatgatctgtggaatttaatgacccagtgctgggctcaagaacccgaccaaagacctacttttcatagaattcaggaccaacttcagttattcagaaattttttcttaaatagcatttataagtgcagagatgaagcaaacaacagtggagtcataaatgaaagctttgaaggtgaagatggcgatgtgatttgtttgaattcagatgacattatgccagttgctttaatggaaacgaagaaccgagaagggttaaactatatggtacttgctacagaatgtggccaaggtgaagaaaagtctgagggtcctctaggctcccaggaatctgaatcttgtggtctgaggaaagaagagaaggaaccacatgcagacaaagatttctgccaagaaaaacaagtggcttactgcccttctggcaagcctgaaggcctgaactatgcctgtctcactcacagtggatatggagatgggtctgattaa

SEQ ID NO: 767 - DNA, 1815 bp, Homo sapiens
atgcgtggggcggcgcggctggggcggccgggccggagttgcctcccggggcccgcgctgagggccgccgccgcgcccgccctgctgcttgctcgttgcgctgttgccgctgctgccggcctgcgtgccgccgcccgtccgcggcccccggagctgcagtcggcttccgcggggcccagcgtgagtctctacctgagcgaggacgaggtgcgccggctgatcggtcttgatgcagaactttattatgtgagaaatgaccttattagtcactacgctctatcctttagtctgttagtacccagtgagacaaatttcctgcacttcacctggcatgcgaagtccaaggttgaatataagctgggattccaagtggacaatgttttggcaatggatatgccccaggtcaacatttctgttcagggggaagttccacgcactttatcagtgtttcgggtagagctttcctgtactggcaaagtagattctgaagttatgatactaatgcagctcaacttgacagtaaattcttcaaaaaattttaccgtcttaaattttaaacgaaggaaaatgtgctacaaaaaacttgaagaagtaaaaacttcagccttggacaaaaacactagcagaactatttatgatcctgtacatgcagctccaaccacttctacgcgtgtgttttatattagtgtaggggtttgttgtgcagtaatatttctcgtagcaataatattagctgttttgcaccttcataatatgaaaaggattgaactggatgacagcattagtgccagcagtagttcccaagggctgtctcagccatccacccagacgactcagtatctgagagcagacacgcccaacaatgcaactcctatcaccagttatcctaccttgcggatagagaagaacgacttgagaagtgtcactcttttggaggccaaaggcaaggtgaaggatatagcaatatccagagagaggataactctaaaagatgtactccaagaaggtacttttgggcgtattttccatgggattttaatagatgaaaaagatccaaataaagaaaaacaagcatttgtcaaaacagttaaagatcaagcttctgaaattcaggtgacaatgatgctcactgaaagttgtaagctgcgaggtcttcatcacagaaatcttcttcctattactcatgtgtgtatagaagaaggagaaaagcccatggtgatattgccttacatgaattgggggaatcttaaattgtttttacgacagtgcaagttagtagaggccaataatccacaggcaatttctcagcaagacctggtacacatggctattcagattgcctgtggaatgagctacctggccagaagggaagtcatccacaaagacctggctgccaggaactgtgtcattgatgacacacttcaagttaagatcacagacaatgccctctccagagacttgttccccatggactatcactgtctgggggacaatgaaaacaggccagttcgttggatggctcttgaaagtctggttaataacgagttctctagcgctagtgatgtgtgggcctttggagtgacgctgtgggaactcatgactctgggccagactccctacgtggacattgaccccttcgagatggccgcatacctgaaagatggttaccgaatagcccagccaatcaactgtcctgatgaattatttgctgtgatggcctgttgctgggccttagatccagaggagaggcccaagtttcagcagctggtacagtgcctaacagagtttcatgcagccctgggggcctacgtctga

SEQ ID NO: 768 - DNA, 1815 bp, Homo sapiens
atgcgtggggcggcgcggctggggcggccgggccggagttgcctcccggggcccgcgctgagggccgccgccgcgcccgccctgctgcttgctcgttgcgctgttgccgctgctgccggcctgcgtgccgccgcccgtccgcggcccccggagctgcagtcggcttccgcggggcccagcgtgagtctctacctgagcgaggacgaggtgcgccggctgatcggtcttgatgcagaactttattatgtgagaaatgaccttattagtcactacgctctatcctttaatctgttagtacccagtgagacaaatttcctgcacttcacctggcatgcgaagtccaaggttgaatataagctgggattccaagtggacaatgttttggcaatggatatgccccaggtcaacatttctgttcagggggaagttccacgcactttatcagtgtttcgggtagagctttcctgtactggcaaagtagattctgaagttatgatactaatgcagctcaacttgacagtaaattcttcaaaaaattttaccgtcttaaattttaaacgaaggaaaatgtgctacaaaaaacttgaagaagtaaaaacttcagccttggacaaaaacactagcagaactatttatgatcctgtacatgcagctccaaccacttctacgcgtgtgttttatattagtgtaggggtttgttgtgcagtaatatttctcgtagcaataatattagctgttttgcaccttcataatatgaaaaggattgaactggatgacagcattagtgccagcagtagttcccaagggctgtctcagccatccacccagacgactcagtatctgagagcagacacgcccaacaatgcaactcctatcaccagttatcctaccttgcggatagagaagaacgacttgagaagtgtcactcttttggaggccaaaggcaaggtgaaggatatagcaatatccagagagaggataactctaaaagatgtactccaagaaggtacttttgggcgtattttccatgggattttaatagatgaaaaagatccaaataaagaaaaacaagcatttgtcaaaacagttaaagatcaagcttctgaaattcaggtgacaatgatgctcactgaaagttgtaagctgcgaggtcttcatcacagaaatcttcttcctattactcatgtgtgtatagaagaaggagaaaagcccatggtgatattgccttacatgaattgggggaatcttaaattgtttttacgacagtgcaagttagtagaggccaataatccacaggcaatttctcagcaagacctggtacacatggctattcagattgcctgtggaatgagctacctggccagaagggaagtcatccacaaagacctggctgccaggaactgtgtcattgatgacacacttcaagttaagatcacagacaatgccctctccagagacttgttccccatggactatcactgtctgggggacaatgaaaacaggccagttcgttggatggctcttgaaagtctggttaataacgagttgtctagcgctagtgatgtgtgggcctttggagtgacgctgtgggaactcatgactctgggccagactccctacgtggacattgaccccttcgagatggccgcatacctgaaagatggttaccgaatagcccagccaatcaactgtcctgatgaattatttgctgtgatggcctgttgctgggccttagatccagaggagaggcccaagtttcagcagctggtacagtgcctaacagagtttcatgcagccctgggggcctacgtctga

SEQ ID NO: 769 - DNA, 1269 bp, Homo sapiens
atgggcatgacacggatgctcctggaatgcagtctcagtgacaagttgtgtgtcatccaggagaagcagtatgaagtgattatcgtcccaactttgttggttactatcttcctcatccttcttggggtcatcctgtggctttttatcagagaacaaagaactcaacagcagcgttctggacctcaaggcattgcccctgttcctccacctagggacctaagctgggaagcaggacatggaggaaatgtggctttgccacttaaggagacatccgtggaaaactttctgggagctaccacacctgccctggctaagctgcaggtgccgcgggagcaactctctgaagttctggagcagatttgcagtggtagctgtgggcccatctttcgagccaatatgaacactggggacccttctaagcccaagagtgttattctcaaggctttaaaagaaccagctgggctccatgaggtacaagatttcttagggcgaatccaattccatcaatacctggggaaacacaaaaacctggtgcagctggaaggctgctgcactgaaaagctgccactctatatggtgttggaggatgtggcccagggggacctgctcagctttctctggacctgtcggcgggatgtgatgactatggatggtcttctctatgatctcacagaaaaacaagtatatcacatcggaaagcaggtccttttggcgctggaattcctgcaggagaagcatttgttccatggggatgtggcagccaggaatattctgatgcaaagtgatctcactgctaagctctgtggattaggcctggcttatgaagtttacacccgaggggccatctcctctactcaaaccatacctctcaagtggcttgccccagaacggcttctcctgagacctgctagcatcagagcagatgtctggtcttttgggatcctgctctatgagatggtgactctaggagcaccaccgtatcctgaagtccctcctaccagcatcctagagcatctccaaagaaggaaaatcatgaagagacccagtagctgcacacataccatgtacagtatcatgaagtcctgctggcgctggcgtgaggctgaccgcccctcacctagagagctgcgcttgcgcctagaagctgccattaaaactgcagatgacgaggctgtgttacaagtaccagagttggtggtacctgaactgtatgcagctgtggccggcatcagagtggagagcctcttctacaactatagcatgctttga

SEQ ID NO: 770 - DNA, 3375 bp, Homo sapiens
atggactctttagccagcttagttctctgtggagtcagcttgctcctttctggaactgtggaaggtgccatggacttgatcttgatcaattccctacctcttgtatctgatgctgaaacatctctcacctgcattgcctctgggtggcgcccccatgagcccatcaccataggaagggactttgaagccttaatgaaccagcaccaggatccgctggaagttactcaagatgtgaccagagaatgggctaaaaaagttgtttggaagagagaaaaggctagtaagatcaatggtgcttatttctgtgaagggcgagttcgaggagaggcaatcaggatacgaaccatgaagatgcgtcaacaagcttccttcctaccagctactttaactatgactgtggacaagggagataacgtgaacatatctttcaaaaaggtattgattaaagaagaagatgcagtgatttacaaaaatggttccttcatccattcagtgccccggcatgaagtacctgatattctagaagtacacctgcctcatgctcagccccaggatgctggagtgtactcggccaggtatataggaggaaacctcttcacctcggccttcaccaggctgatagtccggagatgtgaagcccagaagtggggacctgaatgcaaccatctctgtactgcttgtatgaacaatggtgtctgccatgaagatactggagaatgcatttgccctcctgggtttatgggaaggacgtgtgagaaggcttgtgaactgcacacgtttggcagaacttgtaaagaaaggtgcagtggacaagagggatgcaagtcttatgtgttctgtctccctgacccctatgggtgttcctgtgccacaggctggaagggtctgcagtgcaatgaagcatgccaccctggtttttacgggccagattgtaagcttaggtgcagctgcaacaatggggagatgtgtgatcgcttccaaggatgtctctgctctccaggatggcaggggctccagtgtgagagagaaggcatacagaggatgaccccaaagatagtggatttgccagatcatatagaagtaaacagtggtaaatttaatcccatttgcaaagcttctggctggccgctacctactaatgaagaaatgaccctggtgaagccggatgggacagtgctccatccaaaagactttaaccatacggatcatttctcagtagccatattcaccatccaccggatcctcccccctgactcaggagtttgggtctgcagtgtgaacacagtggctgggatggtggaaaagcccttcaacatttctgttaaagttcttccaaagcccctgaatgccccaaacgtgattgacactggacataactttgctgtcatcaacatcagctctgagccttactttggggatggaccaatcaaatccaagaagcttctatacaaacccgttaatcactatgaggcttggcaacatattcaagtgacaaatgagattgttacactcaactatttggaacctcggacagaatatgaactctgtgtgcaactggtccgtcgtggagagggtggggaagggcatcctggacctgtgagacgcttcacaacagcttctatcggactccctcctccaagaggtctaaatctcctgcctaaaagtcagaccactctaaatttgacctggcaaccaatatttccaagctcggaagatgacttttatgttgaagtggagagaaggtctgtgcaaaaaagtgatcagcagaatattaaagttccaggcaacttgacttcggtgctacttaacaacttacatcccagggagcagtacgtggtccgagctagagtcaacaccaaggcccagggggaatggagtgaagatctcactgcttggacccttagtgacattcttcctcctcaaccagaaaacatcaagatttccaacattacacactcctcagctgtgatttcttggacaatattggatggctattctatttcttctattactatccgttacaaggttcaaggcaagaatgaagaccagcacgttgatgtgaagataaagaatgccaccatcactcagtatcagctcaagggcctagagcctgaaacagcataccaggtggacatttttgcagagaacaacatagggtcaagcaacccagccttttctcatgaactggtgaccctcccagaatctcaagcaccagcggacctcggaggggggaagatgctgcttatagccatccttggctctgctggaatgacctgcctgactgtgctgttggcctttctgatcatattgcaattgaagagggcaaatgtgcaaaggagaatggcccaagccttccaaaacgtgagggaagaaccagctgtgcagttcaactcagggactctggccctaaacaggaaggtcaaaaacaacccagatcctacaatttatccagtgcttgactggaatgacatcaaatttcaagatgtgattggggagggcaattttggccaagttcttaaggcgcgcatcaagaaggatgggttacggatggatgctgccatcaaaagaatgaaagaatatgcctccaaagatgatcacagggactttgcaggagaactggaagttctttgtaaacttggacaccatccaaacatcatcaatctcttaggagcatgtgaacatcgaggctacttgtacctggccattgagtacgcgccccatggaaaccttctggacttccttcgcaagagccgtgtgctggagacggacccagcatttgccattgccaatagcaccgcgtccacactgtcctcccagcagctccttcacttcgctgccgacgtggcccggggcatggactacttgagccaaaaacagtttatccacagggatctggctgccagaaacattttagttggtgaaaactatgtggcaaaaatagcagattttggattgtcccgaggtcaagaggtgtatgtgaaaaagacaatgggaaggctcccagtgcgctggatggccatcgagtcactgaattacagtgtgtacacaaccaacagtgatgtatggtcctatggtgtgttactatgggagattgttagcttaggaggcacaccctactgcgggatgacttgtgcagaactctacgagaagctgccccagggctacagactggagaagcccctgaactgtgatgatgaggtgtatgatctaatgagacaatgctggcgggagaagccttatgagaggccatcatttgcccagatattggtgtccttaaacagaatgttagaggagcgaaagacctacgtgaataccacgctttatgagaagtttacttatgcaggaattgactgttctgctgaagaagcggcctag

SEQ ID NO: 771 - DNA, 3375 bp, Homo sapiens
atggactctttagccagcttagttctctgtggagtcagcttgctcctttctggaactgtggaaggtgccatggacttgatcttgatcaattccctacctcttgtatctgatgctgaaacatctctcacctgcattgcctctgggtggcgcccccatgagcccatcaccataggaagggactttgaagccttaatgaaccagcaccaggatccgctggaagttactcaagatgtgaccagagaatgggctaaaaaagttgtttggaagagagaaaaggctagtaagatcaatggtgcttatttctgtgaagggcgagttcgaggagaggcaatcaggatacgaaccatgaagatgcgtcaacaagcttccttcctaccagctactttaactatgactgtggacaagggagataacgtgaacatatctttcaaaaaggtattgattaaagaagaagatgcagtgatttacaaaaatggttccttcatccattcagtgccccggcatgaagtacctgatattctagaagtacacctgcctcatgctcagccccaggatgctggagtgtactcggccaggtatataggaggaaacctcttcacctcggccttcaccaggctgatagtccggagatgtgaagcccagaagtggggacctgaatgcaaccatctctgtactgcttgtatgaacaatggtgtctgccatgaagatactggagaatgcatttgccctcctgggtttatgggaaggacgtgtgagaaggcttgtgaactgcacacgtttggcagaacttgtaaagaaaggtgcagtggacaagagggatgcaagtcttatgtgttctgtctccctgacccctatgggtgttcctgtgccacaggctggaagggtctgcagtgcaatgaagcatgccaccctggtttttacgggccagattgtaagcttaggtgcagctgcaacaatggggagatgtgtgatcgcttccaaggatgtctctgctctccaggatggcaggggctccagtgtgagagagaaggcataccgaggatgaccccaaagatagtggatttgccagatcatatagaagtaaacagtggtaaatttaatcccatttgcaaagcttctggctggccgctacctactaatgaagaaatgaccctggtgaagccggatgggacagtgctccatccaaaagactttaaccatacggatcatttctcagtagccatattcaccatccaccggatcctcccccctgactcaggagtttgggtctgcagtgtgaacacagtggctgggatggtggaaaagcccttcaacatttctgttaaagttcttccaaagcccctgaatgccccaaacgtgattgacactggacataactttgctgtcatcaacatcagctctgagccttactttggggatggaccaatcaaatccaagaagcttctatacaaacccattaatcactatgaggcttggcaacatattcaagtgacaaatgagattgttacactcaactatttggaacctcggacagaatatgaactctgtgtgcaactggtccgtcgtggagagggtggggaagggcatcctggacctgtgagacgcttcacaacagcttctatcggactccctcctccaagaggtctaaatctcctgcctaaaagtcagaccactctaaatttgacctggcaaccaatatttccaagctcggaagatgacttttatgttgaagtggagagaaggtctgtgcaaaaaagtgatcagcagaatattaaagttccaggcaacttgacttcggtgctacttaacaacttacatcccagggagcagtacgtggtccgagctagagtcaacaccaaggcccagggggaatggagtgaagatctcactgcttggacccttagtgacattcttcctcctcaaccagaaaacatcaagatttccaacattacacactcctcagctgtgatttcttggacaatattggatggctattctatttcttctattactatccgttacaaggttcaaggcaagaatgaagaccagcacgttgatgtgaagataaagaatgccaccatcactcagtatcagctcaagggcctagagcctgaaacagcataccaggtggacatttttgcagagaacaacatagggtcaagcaacccagccttttctcatgaactggtgaccctcccagaatctcaagcaccagcggacctcggaggggggaagatgctgcttatagccatccttggctctgctggaatgacctgcctgactgtgctgttggcctttctgatcatattgcaattgaagagggcaaatgtgcaaaggagaatggcccaagccttccaaaacgtgagggaagaaccagctgtgcagttcaactcagggactctggccctaaacaggaaggtcaaaaacaacccagatcctacaatttatccagtgcttgactggaatgacatcaaatttcaagatgtgattggggagggcaattttggccaagttcttaaggcgcgcatcaagaaggatgggttacggatggatgctgccatcaaaagaatgaaagaatatgcctccaaagatgatcacagggactttgcaggagaactggaagttctttgtaaacttggacaccatccaaacatcatcaatctcttaggagcatgtgaacatcgaggctacttgtacctggccattgagtacgcgccccatggaaaccttctggacttccttcgcaagagccgtgtgctggagacggacccagcatttgccattgccaatagcaccgcgtccacactgtcctcccagcagctccttcacttcgctgccgacgtggcccggggcatggactacttgagccaaaaacagtttatccacagggatctggctgccagaaacattttagttggtgaaaactatgtggcaaaaatagcagattttggattgtcccgaggtcaagaggtgtatgtgaaaaagacaatgggaaggctcccagtgcgctggatggccatcgagtcactgaattacagtgtgtacacaaccaacagtgatgtatggtcctatggtgtgttactatgggagattgttagcttaggaggcacaccctactgcgggatgacttgtgcagaactctacgagaagctgccccagggctacagactggagaagcccctgaactgtgatgatgaggtgtatgatctaatgagacaatgctggcgggagaagccttatgagaggccatcatttgcccagatattggtgtccttaaacagaatgttagaggagcgaaagacctacgtgaataccacgctttatgagaagtttacttatgcaggaattgactgttctgctgaagaagcggcctag

SEQ ID NO: 772 - DNA, 3375 bp, Homo sapiens
atggactctttagccagcttagttctctgtggagtcagcttgctcctttctggaactgtggaaggtgccatggacttgatcttgatcaattccctacctcttgtatctgatgctgaaacatctctcacctgcattgcctctgggtggcgcccccatgagcccatcaccataggaagggactttgaagccttaatgaaccagcaccaggatccgctggaagttactcaagatgtgaccagagaatgggctaaaaaagttgtttggaagagagaaaaggctagtaagatcaatggtgcttatttctgtgaagggcgagttcgaggagaggcaatcaggatacgaaccatgaagatgcgtcaacaagcttccttcctaccagctactttaactatgactgtggacaagggagataacgtgaacatatctttcaaaaaggtattgattaaagaagaagatgcagtgatttacaaaaatggttccttcatccattcagtgccccggcatgaagtacctgatattctagaagtacacctgcctcatgctcagccccaggatgctggagtgtactcggccaggtatataggaggaaacctcttcacctcggccttcaccaggctgatagtccggagatgtgaagcccagaagtggggacctgaatgcaaccatctctgtactgcttgtatgaacaatggtgtctgccatgaagatactggagaatgcatttgccctcctgggtttatgggaaggacgtgtgagaaggcttgtgaactgcacacgtttggcagaacttgtaaagaaaggtgcagtggacaagagggatgcaagtcttatgtgttctgtctccctgacccctatgggtgttcctgtgccacaggctggaagggtctgcagtgcaatgaagcatgccaccctggtttttacgggccagattgtaagcttaggtgcagctgcaacaatggggagatgtgtgatcgcttccaaggatgtctctgctctccaggatggcaggggctccagtgtgagagagaaggcataccgaggatgaccccaaagatagtggatttgccagatcatatagaagtaaacagtggtaaatttaatcccatttgcaaagcttctggctggccgctacctactaatgaagaaatgaccctggtgaagccggatgggacagtgctccatccaaaagactttaaccatacggatcatttctcagtagccatattcaccatccaccggatcctcccccctgactcaggagtttgggtctgcagtgtgaacacagtggctgggatggtggaaaagcccttcaacatttctgttaaagttcttccaaagcccctgaatgccccaaacgtgattgacactggacataactttgctgtcatcaacatcagctctgagccttactttggggatggaccaatcaaatccaagaagcttctatacaaacccgttaatcactatgaggcttggcaacatattcaagtgacaaatgagattgttacactcaactatttggaacctcggacagaatatgaactctgtgtgcaactggtccgtcgtggagagggtggggaagggcatcctggacctgtgagacgcttcacaacagcttctatcggactccctcctccaagaggtctaaatctcctgcctaaaagtcagaccactctaaatttgacctggcaaccaatatttccaagctcggaagatgacttttatgttgaagtggagagaaggtctgtgcaaaaaagtgatcagcagaatattaaagttccaggcaacttgacttcgttgctacttaacaacttacatcccagggagcagtacgtggtccgagctagagtcaacaccaaggcccagggggaatggagtgaagatctcactgcttggacccttagtgacattcttcctcctcaaccagaaaacatcaagatttccaacattacacactcctcagctgtgatttcttggacaatattggatggctattctatttcttctattactatccgttacaaggttcaaggcaagaatgaagaccagcacgttgatgtgaagataaagaatgccaccatcactcagtatcagctcaagggcctagagcctgaaacagcataccaggtggacatttttgcagagaacaacatagggtcaagcaacccagccttttctcatgaactggtgaccctcccagaatctcaagcaccagcggacctcggaggggggaagatgctgcttatagccatccttggctctgctggaatgacctgcctgactgtgctgttggcctttctgatcatattgcaattgaagagggcaaatgtgcaaaggagaatggcccaagccttccaaaacgtgagggaagaaccagctgtgcagttcaactcagggactctggccctaaacaggaaggtcaaaaacaacccagatcctacaatttatccagtgcttgactggaatgacatcaaatttcaagatgtgattggggagggcaattttggccaagttcttaaggcgcgcatcaagaaggatgggttacggatggatgctgccatcaaaagaatgaaagaatatgcctccaaagatgatcacagggactttgcaggagaactggaagttctttgtaaacttggacaccatccaaacatcatcaatctcttaggagcatgtgaacatcgaggctacttgtacctggccattgagtacgcgccccatggaaaccttctggacttccttcgcaagagccgtgtgctggagacggacccagcatttgccattgccaatagcaccgcgtccacactgtcctcccagcagctccttcacttcgctgccgacgtggcccggggcatggactacttgagccaaaaacagtttatccacagggatctggctgccagaaacattttagttggtgaaaactatgtggcaaaaatagcagattttggattgtcccgaggtcaagaggtgtatgtgaaaaagacaatgggaaggctcccagtgcgctggatggccatcgagtcactgaattacagtgtgtacacaaccaacagtgatgtatggtcctatggtgtgttactatgggagattgttagcttaggaggcacaccctactgcgggatgacttgtgcagaactctacgagaagctgccccagggctacagactggagaagcccctgaactgtgatgatgaggtgtatgatctaatgagacaatgctggcgggagaagccttatgagaggccatcatttgcccagatattggtgtccttaaacagaatgttagaggagcgaaagacctacgtgaataccacgctttatgagaagtttacttatgcaggaattgactgttctgctgaagaagcggcctag

SEQ ID NO: 773 - DNA, 1995 bp, Homo sapiens
atgcttcccgaggctggctccctgtggctactgaagctgctccgggacatccagttggcccagttttactggcccatcctagaggagcttaatgtcacccggccagggcacttcgactttgtaaagcctgaggacctggacggcattggcatgggccggcctgcccaacgcagactgtccgaagctctgaaaagcctacgttctgggcctaagtctaagaactgggtctacaagatccttggaggttttgcccctgagcacaaggagcccaccctgcccacggacagcccacggcacctccctgagccagaggggggcctcaagtgtctgatcccagagggtgctgtttgcagaggggagctgctgggttcaggctgcttcggtgtggtgcaccgagggctgtggacgctgcccagtggcaagagtgtcccagtggctgtcaagtccctccgggtaggtcccgaaggcccgatgggcacagaactgggggacttcctgcgagaggtatcggtcatgatgaacttggagcacccacacgtgctgcgtctgcacggccttgtactgggccagcctctgcagatggtgatggagctggcgccactgggctccctgcacgcgcgcttaacggccccggccccgacacccccgctgctcgtggccctgctctgcctcttcctgcggcagctggcgggagccatggcgtacctgggggcccgcgggctggtgcaccgagacctcgctacgcgcaacctacagctggcgtcgccgcgcaccatcaaggtggctgacttcgggctggtgcggcctctgggcggtgcccggggccgctacgtcatgggcgggccccgccctatcccctacacctggtgtgccccagagagcctgcgccacggagccttctcgtctgcctcggacgtgtggatgtttggggtgacgctgtgggagatgttctccgggggcgaggaaccctggcccggggtcccaccgtacctcatcctgcagcggctggaggacagagcccggctgcctaggcctcccccctcctccagggccctctactccctcgccttgcgctgctgggccccccaccctgccgaccggcctagcttttcccacctggaggggctgctgcaagaggccgggccttcggaagcatgttgtgtgagggatgccacagaaccaggcgccctgaggatggagactggtgaccccatcacagtcatcgagggcagctcctctttccacagccccgactccacaatctggaaggaccagaatggtcgcaccttcaaagtgggcagcttcccagcctcggcagtgacgctgacagatgcggggggcttgccagccacccgtccagtccacagaggcacccctgcccggggagatcaacacccaggaagcatagatggaaagaaggcaaatctttgggatgcgcccccagcacggggccagaggaggaacatgcccctggagaggatgaaaggcatttccaggagtctggagtcagttctgtccctcggtcctcgtcccacagggggtggttcaagcccccctgaaattcgacaagccagagctgtgccccagggacctccaggcctgcctccacgcccacctttatcctctagctctcctcagcccagccagccctctagggagaggcttccctggcccgaaagaaaacccccacacaatcaccccatgggaatgcctggagcccgtaaagccgctgccctctctggaggcctcttgtccgatcctgagttgcagaggaagattatggaaatggagctgagtgtgcattgggtcacccaccaggagtgccagacagcactaggagccactgggggagatgtggcttctgccatccggaacctcaaggtagatcagctcttcctcctgagtagccggtccagagctgactgctggcgcatcctggagcattaccagtgggacctctcagctgccagccgttatgtcctggccaggccctga

SEQ ID NO: 774 - DNA, 2001 bp, Homo sapiens
atgcttcccgaggctggctccctgtggctactgaagctgctccgggacatccagttggcccagttttactggcccatcctagaggagcttaatgtcacccggccagggcacttcgactttgtaaagcctgaggacctggacggcattggcatgggccggcctgcccaacgcagactgtccgaagctctgaaaagcctacgttctgggcctaagtctaagaactgggtctacaagatccttggaggttttgcccctgagcacaaggagcccaccctgcccacggacagcccacggcacctccctgagccagaggggggcctcaagtgtctgatcccagagggtgctgtttgcagaggggagctgctgggttcaggctgcttcggtgtggtgcaccgagggctgtggacgctgcccagtggcaagagtgtcccagtggctgtcaagtccctccgggtaggtcccgaaggcccgatgggcacagaactgggggacttcctgcgagaggtatcggtcatgatgaacttggagcacccacacgtgctgcgtctgcacggccttgtactgggccagcctctgcagatggtgatggagctggcgccactgggctccctgcacgcgcgcttaacggccccggccccgacacccccgctgctcgtggccctgctctgcctcttcctgcggcagctggcgggagccatggcgtacctgggggcccgcgggctggtgcaccgagacctcgctacgcgcaacctacagctggcgtcgccgcgcaccatcaaggtggctgacttcgggctggtgcggcctctgggcggtgcccggggccgctacgtcatgggcgggccccgccctatcccctacacctggtgtgccccagagagcctgcgccacggagccttctcgtctgcctcggacgtgtggatgtttggggtgacgctgtgggagatgttctccgggggcgaggaaccctggcccggggtcccaccgtacctcatcctgcagcggctggaggacagagcccggctgcctaggcctcccccctcctccagggccctctactccctcgccttgcgctgctgggccccccaccctgccgaccggcctagcttttcccacctggaggggctgctgcaagaggccgggccttcggaagcatgttgtgtgagggatgccacagaaccaggcgccctgaggatggagactggtgaccccatcacagtcatcgagggcagctcctctttccacagccccgactccacaatctggaaggaccagaatggtcgcaccttcaaagtgggcagcttcccagcctcggcagtgacgctgacagatgcggggggcttgccagccacccgtccagtccacagaggcacccctgcccggggagatcaacacccaggaagcatagatggagacagaaagaaggcaaatctttgggatgcgcccccagcacggggccagaggaggaacatgcccctggagaggatgaaaggcatttccaggagtctggagtcagttctgtccctcggtcctcgtcccacagggggtggttcaagcccccctgaaattcgacaagccagagctgtgccccagggacctccaggcctgcctccacgcccacctttatcctctagctctcctcagcccagccagccctctagggagaggcttccctggcccgaaagaaaacccccacacaatcaccccatgggaatgcctggagcccgtaaagccgctgccctctctggaggcctcttgtccgatcctgagttgcagaggaagattatggaagtggagctgagtgtgcattgggtcacccaccaggagtgccagacagcactaggagccactgggggagatgtggcttctgccatccggaacctcaaggtagatcagctcttcctcctgagtagccggtccagagctgactgctggcgcatcctggagcattaccagtgggacctctcagctgccagccgttatgtcctggccaggccctga

SEQ ID NO: 775 - DNA, 2084 bp, Homo sapiens
atgcttcccgaggctggctccctgtggctactgaagctgctccgggacatccagttggcccagttttactggcccatcctagaggagcttaatgtcacccggccagggcacttcgactttgtaaagcctgaggacctggacggcattggcatgggccggcctgcccaacgcagactgtccgaagctctgaaaagcctacgttctgggcctaagtctaagaactgggtctacaagatccttggaggttttgcccctgagcacaaggagcccaccctgcccacggacagcccacggcacctccctgagccagaggggggcctcaagtgtctgatcccagagggtgctgtttgcagaggggagctgctgggttcaggctgcttcggtgtggtgcaccgagggctgtggacgctgcccagtggcaagagtgtcccagtggctgtcaagtccctccgggtaggtcccgaaggcccgatgggcacagaactgggggacttcctgcgagaggtatcggtcatgatgaacttggagcacccacacgtgctgcgtctgcacggccttgtactgggccagcctctgcagatggtgatggagctggcgccactgggctccctgcacgcgcgcttaacggccccggccccgacacccccgctgctcgtggccctgctctgcctcttcctgcggcagctggcgggagccatggcgtacctgggggcccgcgggctggtgcaccgagacctcgctacgcgcaacctacagctggcgtcgccgcgcaccatcaaggtggctgacttcgggctggtgcggcctctgggcggtgcccggggccgctacgtcatgggcgggccccgccctatcccctacacctggtgtgccccagagagcctgcgccacggagccttctcgtctgcctcggacgtgtggatgtttggggtgacgctgtgggagatgttctccgggggcgaggaaccctggcccggggtcccaccgtacctcatcctgcagcggctggaggacagagcccggctgcctaggcctcccccctcctccagggccctctactccctcgccttgcgctgctgggccccccaccctgccgaccggcctagcttttcccacctggaggggctgctgcaagaggccgggccttcggaagcatgttgtgtgagggatgccacagaaccaggcgccctgaggatggagactggtgaccccatcacagtcatcgagggcagctcctctttccacagccccgactccacaatctggaaggaccagaatggtcgcaccttcaaagtgggcagcttcccagcctcggcagtgacgctgacagatgcggggggcttgccagccacccgtccagtccacagaggcacccctgcccggggagatcaacacccaggaagcatagatggagacagaaagaaggcaaatctttgggatgcgcccccagcacggggccagaggaggaacatgcccctggagaggatgaaaggcatttccaggagtctggagtcagttctgtccctcggtcctcgtcccacagggggtggttcaagcccccctgaaattcgacaagccagagctgtgccccagggacctccaggcctgcctccacgcccacctttatcctctagctctcctcagcccagccagccctctagggagaggcttccctggcccgaaagaaaacccccacacaatcaccccatgggaatgcctggagcccgtaaagccgctgccctctctggaggcctcttgtccgatcctgagttgcagaggaagattatggaggtgaggtctcactgaaatggcctggtgtccagaaagggctacaggcaggggcaaggccctgagtgaggctttgtttgtcccaaatggagctgagtgtgcattgggtcacccaccaggagtgccagacagcactaggagccactgggggagatgtggcttctgccatccggaacctcaaggtagatcagctcttcctcctgagtagccggtccagagctgactgctggcgcatcctggagcattaccagtgggacctctcagctgccagccgttatgtcctggccaggccctga

SEQ ID NO: 776 - DNA, 1584 bp, Homo sapiens
atgatcctttcctcctataacaccatccagtcggttttctgttgctgctgttgctgttcagtgcagaagcgacaaatgagaacacagataagcctgagcacagatgaagagcttccagaaaaatacacccagcatcgcaggccgtggctcagccaattgtcaaataagaagcaatccaacacgggctgtgtgcagccgtcaaaacgaaagccactgcctcccctcccaccctctgaggttgctgaagagaagatccaagtcaaggcactttatgattttctgcccagagaaccctgtaatttagccttaaggagagcagaagaatacctgatactggagaaatacaatcctcactggtggaaggcaagagaccgtttggggaatgaaggcttaatcccaagcaactatgtgactgaaaacaaaataactaatttagaaatatatgagtggtaccatagaaacattaccagaaatcaggcagaacatctattgagacaagagtctaaagaaggtgcatttattgtcagagattcaagacatttaggatcctacacaatttccgtatttatgggagctagaagaagtacggaggctgccataaaacattatcagataaaaaagaatgactcaggacagtggtatgtggctgaaagacacgcctttcaatcaatccctgagttaatctggtatcaccagcacaatgcagccggtctcatgactcgtctccgatatccagttgggctgatgggcagttgtttaccagccacagctgggtttagctacgaaaagtgggagatagatccatctgagttggcttttataaaggagattggaagcggtcagtttggagtggtccatttaggtgaatggcggtcacatatccaggtagctatcaaggccatcaatgaaggctccatgtctgaagaggatttcattgaagaggccaaagtgatgatgaaattatctcattcaaagctagtgcaactttatggagtctgtatacagcggaagcccctttacattgtgacagagttcatggaaaatggctgcctgcttaactatctcagggagaataaaggaaagcttaggaaggaaatgctactgagtgtatgccaggatatatgtgaaggaatggaatatctggagaggaatggctatattcatagggatttggcggcaaggaattgtttggtcagttcaacatgcatagtaaaaatttcagactttggaatgacaaggtacgttttggatgatgagtatgtcagttcttttggagccaagttcccaatcaagtggtcccctcctgaagtttttcttttcaataagtacagcagtaaatctgatgtctggtcatttggagttttaatgtgggaagtttttacagaaggaaaaatgccttttgaaaataagtcaaatttgcaagtcgtggaagctatttctgaaggcttcaggctatatcgccctcacctggcaccaatgtccatatatgaagtcatgtacagctgctggcatgagaaacctgaaggccgccctacatttgcggagctgctgcgggctgtcacagagattgcggaaacctggtga

SEQ ID NO: 777 - DNA, 1584 bp, Homo sapiens
atgatcctttcctcctataacaccatccagtcggttttctgttgctgctgttgctgttcagtgcagaagcgacaaatgagaacacagataagcctgagcacagatgaagagcttccagaaaaatacacccagcatcgcaggccgtggctcagccaattgtcaaataagaagcaatccaacacgggccgtgtgcagccgtcaaaacgaaagccactgcctcccctcccaccctctgaggttgctgaagagaagatccaagtcaaggcactttatgattttctgcccagagaaccctgtaatttagccttaaggagagcagaagaatacctgatactggagaaatacaatcctcactggtggaaggcaagagaccgtttggggaatgaaggcttaatcccaagcaactatgtgactgaaaacaaaataactaatttagaaatatatgagtggtaccatagaaacattaccagaaatcaggcagaacatctattgagacaagagtctaaagaaggtgcatttattgtcagagattcaagacatttaggatcctacacaatttccgtatttatgggagctagaagaagtacggaggctgccataaaacattatcagataaaaaagaatgactcaggacagtggtatgtggctgaaagacacgcctttcaatcaatccctgagttaatctggtatcaccagcacaatgcagccggtctcatgactcgtctccgatatccagttgggctgatgggcagttgtttaccagccacagctgggtttagctacgaaaagtgggagatagatccatctgagttggcttttataaaggagattggaagcggtcagtttggagtggtccatttaggtgaatggcggtcacatatccaggtagctatcaaggccatcaatgaaggctccatgtctgaagaggatttcattgaagaggccaaagtgatgatgaaattatctcattcaaagctagtgcaactttatggagtctgtatacagcagaagcccctttacattgtgacagagttcatggaaaatggctgcctgcttaactatctcagggagaataaaggaaagcttaggaaggaaatgctactgagtgtatgccaggatatatgtgaaggaatggaatatctggagaggaatggctatattcatagggatttggcggcaaggaattgtttggtcagttcaacatgcatagtaaaaatttcagactttggaatgacaaggtacgttttggatgatgagtatgtcagttcttttggagccaagttcccaatcaagtggtcccctcctgaagtttttcttttcaataagtacagcagtaaatctgatgtctggtcatttggagttttaatgtgggaagtttttacagaaggaaaaatgccttttgaaaataagtcaaatttgcaagtcgtggaagctatttctgaaggcttcaggctatatcgccctcacctggcaccaatgtccatatatgaagtcatgtacagctgctggcatgagaaacctgaaggccgccctacatttgcggagctgctgcgggctgtcacagagattgcggaaacctggtga

SEQ ID NO: 778 - DNA, 1465 bp, Homo sapiens
atgatcctttcctcctataacaccatccagtcggttttctgttgctgctgttgctgttcagtgcagaagcgacaaatgagaacacagataagcctgagcacagatgaagagcttccagaaaaatacacccagcatcgcaggccgtggctcagccaattgtcaaataagaagcaatccaacacgggccgtgtgcagccgtcaaaacgaaagccactgcctcccctcccaccctctgaggttgctgaagagaagatccaagtcaaggcactttatgattttctgcccagagaaccctgtaatttagccttaaggagagcagaagaatacctgatactggagaaatacaatcctcactggtggaaggcaagagaccgtttggggaatgaaggcttaatcccaagcaactatgtgactgaaaacaaaataactaatttagaaatatatgagtggtaccatagaaacattaccagaaatcaggcagaacatctattgagacaagagtctaaagaaggtgcatttattgtcagagattcaagacatttaggatcctacacaatttccgtatttatgggagctagaagaagtacggaggctgccataaaacattatcagataaaaaagaatgactcaggacagtggtatgtggctgaaagacacgcctttcaatcaatccctgagttaatctggtatcaccagcacaatgcagccggtctcatgactcgtctccgatatccagttgggctgatgggcagttgtttaccagccacagctgggtttagctacgaaaagtgggagatagatccatctgagttggcttttataaaggagattggaagcggtcagtttggagtggtccatttaggtgaatggcggtcacatatccaggtagctatcaaggccatcaatgaaggctccatgtctgaagaggatttcattgaagaggccaaagtgatgatgaaattatctcattcaaagctagtgcaactttatggagtctgtatacagcggaagcccctttacattgtgacagagttcatggaaaatggctgcctgcttaactatctcagggagaataaaggaaagcttaggaaggaaatgctactgagtgtatgccaggatatatgtgaaggaatggaatatctggagaggaatggctatattcatagggatttggcggcaaggaattgtttggtcagttcaacatgcatagtaaaaatttcagactttggaatgacaaggagttttaatgtgggaagtttttacagaaggaaaaatgccttttgaaaataagtcaaatttgcaagtcgtggaagctatttctgaaggcttcaggctatatcgccctcacctggcaccaatgtccatatatgaagtcatgtacagctgctggcatgagaaacctgaaggccgccctacatttgcggagctgctgcgggctgtcacagagattgcggaaacctggtga

SEQ ID NO: 779 - DNA, 3564 bp, Homo sapiens
atgcctctgcgccactgggggatggccaggggcagtaagcccgttggggatggagcccagcccatggctgccatgggaggcctgaaggtgcttctgcactgggctggtccaggcggcggggagccctgggtcactttcagtgagtcatcgctgacagctgaggaagtctgcatccacattgcacataaagttggtatcactcctccttgcttcaatctctttgccctcttcgatgctcaggcccaagtctggttgcccccaaaccacatcctagagatccccagagatgcaagcctgatgctatatttccgcataaggttttatttccggaactggcatggcatgaatcctcgggaaccggctgtgtaccgttgtgggcccccaggaaccgaggcatcctcagatcagacagcacaggggatgcaactcctggacccagcctcatttgagtacctctttgagcagggcaagcatgagtttgtgaatgacgtggcatcactgtgggagctgtcgaccgaggaggagatccaccactttaagaatgagagcctgggcatggcctttctgcacctctgtcacctcgctctccgccatggcatccccctggaggaggtggccaagaagaccagcttcaaggactgcatcccgcgctccttccgccggcatatccggcagcacagcgccctgacccggctgcgccttcggaacgtcttccgcaggttcctgcgggacttccagccgggccgactctcccagcagatggtcatggtcaaatacctagccacactcgagcggctggcaccccgcttcggcacagagcgtgtgcccgtgtgccacctgaggctgctggcccaggccgagggggagccctgctacatccgggacagtggggtggcccctacagaccctggccctgagtctgctgctgggcccccaacccacgaggtgctggtgacaggcactggtggcatccagtggtggccagtagaggaggaggtgaacaaggaggagggttctagtggcagcagtggcaggaacccccaagccagcctgtttgggaagaaggccaaggctcacaaggcattcggccagccggcagacaggccgcgggagccactgtgggcctacttctgtgacttccgggacatcacccacgtggtgctgaaagagcactgtgtcagcatccaccggcaggacaacaagtgcctggagctgagcttgccttcccgggctgcggcgctgtccttcgtgtcgctggtggacggctatttccgcctgacggccgactccagccactacctgtgccacgaggtggctcccccacggctggtgatgagcatccgggatgggatccacggacccctgctggagccatttgtgcaggccaagctgcggcccgaggacggcctgtacctcattcactggagcaccagccacccctaccgcctgatcctcacagtggcccagcgtagccaggcaccagacggcatgcagagcttgcggctccgaaagttccccattgagcagcaggacggggccttcgtgctggagggctggggccggtccttccccagcgttcgggaacttggggctgccttgcagggctgcttgctgagggccggggatgactgcttctctctgcgtcgctgttgcctgccccaaccaggagaaacctccaatctcatcatcatgcggggggctcgggccagccccaggacactcaacctcagccagctcagcttccaccgggttgaccagaaggagatcacccagctgtcccacttgggccagggcacaaggaccaacgtgtatgagggccgcctgcgagtggagggcagcggggaccctgaggagggcaagatggatgacgaggaccccctcgtgcctggcagggaccgtgggcaggagctacgagtggtgctcaaagtgctggaccctagtcaccatgacatcgccctggccttctacgagacagccagcctcatgagccaggtctcccacacgcacctggccttcgtgcatggcgtctgtgtgcgcggccctgaaaatatcatggtgacagagtacgtggagcacggacccctggatgtgtggctgcggagggagcggggccatgtgcccatggcttggaagatggtggtggcccagcagctggccagcgccctcagctacctggagaacaagaacctggttcatggtaatgtgtgtggccggaacatcctgctggcccggctggggttggcagagggcaccagccccttcatcaagctgagtgatcctggcgtgggcctgggcgccctctccagggaggagcgggtggagaggatcccctggctggcccccgaatgcctaccaggtggggccaacagcctaagcaccgccatggacaagtgggggtttggcgccaccctcctggagatctgctttgacggagaggcccctctgcagagccgcagtccctccgagaaggagcatttctaccagaggcagcaccggctgcccgagccctcctgcccacagctggccacactcaccagccagtgtctgacctatgagccaacccagaggccatcattccgcaccatcctgcgtgacctcacccggctgcagccccacaatcttgctgacgtcttgactgtgaacccggactcaccggcgtcggaccctacggttttccacaagcgctatttgaaaaagatccgagatctgggcgagggtcacttcggcaaggtcagcttgtactgctacgatccgaccaacgacggcactggcgagatggtggcggtgaaagccctcaaggcagactgcggcccccagcaccgctcgggctggaagcaggagattgacattctgcgcacgctctaccacgagcacatcatcaagtacaagggctgctgcgaggaccaaggcgagaagtcgctgcagctggtcatggagtacgtgcccctgggcagcctccgagactacctgccccggcacagcatcgggctggcccagctgctgctcttcgcccagcagatctgcgagggcatggcctatctgcactcgcagcactacatccaccgagacctagccgcgcgcaacgtgctgctggacaacgacaggctggtcaagatcggggactttggcctagccaaggccgtgcccgaaggccacgagtactaccgcgtgcgcgaggatggggacagccccgtgttctggtatgccccagagtgcctgaaggagtataagttctactatgcgtcagatgtctggtccttcggggtgaccctgtatgagctgctgacgcactgtgactccagccagagcccccccacgaaattccttgagctcataggcattgctcagggtcagatgacagttctgagactcactgagttgctggaacgaggggagaggctgccacggcccgacaaatgtccctgtgaggtctatcatctcatgaagaactgctgggagacagaggcgtcctttcgcccaaccttcgagaacctcatacccattctgaagacagtccatgagaagtaccaaggccaggccccttcagtgttcagcgtgtgctga

SEQ ID NO: 780 - DNA, 3564 bp, Homo sapiens
atgcctctgcgccactgggggatggccaggggcagtaagcccgttggggatggagcccagcccatggctgccatgggaggcctgaaggtgcttctgcactgggctggtccaggcggcggggagccctgggtcactttcagtgagtcatcgctgacagctgaggaagtctgcatccacattgcacataaagttggtatcactcctccttgcttcaatctctttgccctcttcgatgctcaggcccaagtctggttgcccccaaaccacatcctagagatccccagagatgcaagcctgatgctatatttccgcataaggttttatttccggaactggcatggcatgaatcctcgggaaccggctgtgtaccgttgtgggcccccaggaaccgaggcatcctcagatcagacagcacaggggatgcaactcctggacccagcctcatttgagtacctctttgagcagggcaagcatgagtttgtgaatgacgtggcatcactgtgggagctgtcgaccgaggaggagatccaccactttaagaatgagagcctgggcatggcctttctgcacctctgtcacctcgctctccgccatggcatccccctggaggaggtggccaagaagaccagcttcaaggactgcatcccgcgctccttccgccggcatatccggcagcacagcgccctgacccggctgcgccttcggaacgtcttccgcaggttcctgcgggacttccagccgggccgactctcccagcagatggtcatggtcaaatacctagccacactcgagcggctggcaccccgcttcggcacagagcgtgtgcccgtgtgccacctgaggctgctggcccaggccgagggggagccctgctacatccgggacagtggggtggcccctacagaccctggccctgagtctgctgctgggcccccaacccacgaggtgctggtgacaggcactggtggcatccagtggtggccagtagaggaggaggtgaacaaggaggagggttctagtggcagcagtggcaggaacccccaagccagcctgtttgggaagaaggccaaggctcacaaggcagtcagccagccggcagacaggccgcgggagccactgtgggcctacttctgtgacttccgggacatcacccacgtggtgctgaaagagcactgtgtcagcatccaccggcaggacaacaagtgcctggagctgagcttgccttcccgggctgcggcgctgtccttcgtgtcgctggtggacggctatttccgcctgacggccgactccagccactacctgtgccacgaggtggctcccccacggctggtgatgagcatccgggatgggatccacggacccctgctggagccatttgtgcaggccaagctgcggcccgaggacggcctgtacctcattcactggagcaccagccacccctaccgcctgatcctcacagtggcccagcgtagccaggcaccagacggcatgcagagcttgcggctccgaaagttccccattgagcagcaggacggggccttcgtgctggagggctggggccggtccttccccagcgttcgggaacttggggctgccttgcagggctgcttgctgagggccggggatgactgcttctctctgcgtcgctgttgcctgccccaaccaggagaaacctccaatctcatcatcatgcggggggctcgggccagccccaggacactcaacctcagccagctcagcttccaccgggttgaccagaaggagatcacccagctgtcccacttgggccagggcacaaggaccaacgtgtatgagggccgcctgcgagtggagggcagcggggaccctgaggagggcaagatggatgacgaggaccccctcgtgcctggcagggaccgtgggcaggagctacgagtggtgctcaaagtgctggaccctagtcaccatgacatcgccctggccttctacgagacagccagcctcatgagccaggtctcccacacgcacctggccttcgtgcatggcgtctgtgtgcgcggccctgaaaatatcatggtgacagagtacgtggagcacggacccctggatgtgtggctgcggagggagcggggccatgtgcccatggcttggaagatggtggtggcccagcagctggccagcgccctcagctacctggagaacaagaacctggttcatggtaatgtgtgtggccggaacatcctgctggcccggctggggttggcagagggcaccagccccttcatcaagctgagtgatcctggcgtgggcctgggcgccctctccagggaggagcgggtggagaggatcccctggctggcccccgaatgcctaccaggtggggccaacagcctaagcaccgccatggacaagtgggggtttggcgccaccctcctggagatctgctttgacggagaggcccctctgcagagccgcagtccctccgagaaggagcatttctaccagaggcagcaccggctgcccgagccctcctgcccacagctggccacactcaccagccagtgtctgacctatgagccaacccagaggccatcattccgcaccatcctgcgtgacctcacccggctgcagccccacaatcttgctgacgtcttgactgtgaacccggactcaccggcgtcggaccctacggttttccacaagcgctatttgaaaaagatccgagatctgggcgagggtcacttcggcaaggtcagcttgtactgctacgatccgaccaacgacggcactggcgagatggtggcggtgaaagccctcaaggcagactgcggcccccagcaccgctcgggctggaagcaggagattgacattctgcgcacgctctaccacgagcacatcatcaagtacaagggctgctgcgaggaccaaggcgagaagtcgctgcagctggtcatggagtacgtgcccctgggcagcctccgagactacctgccccggcacagcatcgggctggcccagctgctgctcttcgcccagcagatctgcgagggcatggcctatctgcactcgcagcactacatccaccgagacctagccgcgcgcaacgtgctgctggacaacgacaggctggtcaagatcggggactttggcctagccaaggccgtgcccgaaggccacgagtactaccgcgtgcgcgaggatggggacagccccgtgttctggtatgccccagagtgcctgaaggagtataagttctactatgcgtcagatgtctggtccttcggggtgaccctgtatgagctgctgacgcactgtgactccagccagagcccccccacgaaattccttgagctcataggcattgctcagggtcagatgacagttctgagactcactgagttgctggaacgaggggagaggctgccacggcccgacaaatgtccctgtgaggtctatcatctcatgaagaactgctgggagacagaggcgtcctttcgcccaaccttcgagaacctcatacccattctgaagacagtccatgagaagtaccaaggccaggccccttcagtgttcagcgtgtgctga

SEQ ID NO: 781 - DNA, 3564 bp, Homo sapiens
atgcctctgcgccactgggggatggccaggggcagtaagcccgttggggatggagcccagcccatggctgccatgggaggcctgaaggtgcttctgcactgggctggtccaggcggcggggagccctgggtcactttcagtgagtcatcgctgacagctgaggaagtctgcatccacattgcacataaagttggtatcactcctccttgcttcaatctctttgccctcttcgatgctcaggcccaagtctggttgcccccaaaccacatcctagagatccccagagatgcaagcctgatgctatatttccgcataaggttttatttccggaactggcatggcatgaatcctcgggaaccggctgtgtaccgttgtgggcccccaggaaccgaggcatcctcagatcagacagcacaggggatgcaactcctggacccagcctcatttgagtacctctttgagcagggcaagcatgagtttgtgaatgacgtggcatcactgtgggagctgtcgaccgaggaggagatccaccactttaagaatgagagcctgggcatggcctttctgcacctctgtcacctcgctctccgccatggcatccccctggaggaggtggccaagaagaccagcttcaaggactgcatcccgcgctccttccgccggcatatccggcagcacagcgccctgacccggctgcgccttcggaacgtcttccgcaggttcctgcgggacttccagccgggccgactctcccagcagatggtcatggtcaaatacctagccacactcgagcggctggcaccccgcttcggcacagagcgtgtgcccgtgtgccacctgaggctgctggcccaggccgagggggagccctgctacatccgggacagtggggtggcccctacagaccctggccctgagtctgctgctgggcccccaacccacgaggtgctggtgacaggcactggtggcatccagtggtggccagtagaggaggaggtgaacaaggaggagggttctagtggcagcagtggcaggaacccccaagccagcctgtttgggaagaaggccaaggctcacaaggcagtcggccagccggcagacaggccgcgggagccactgtgggcctacttctgtgacttccgggacatcacccacgtggtgctgaaagagcactgtgtcagcatccaccggcaggacaacaagtgcctggagctgagcttgccttcccgggctgcggcgctgtccttcgtgtcgctggtggacggctatttccgcctgacggccgactccagccactacctgtgccacgaggtggctcccccacggctggtgatgagcatccgggatgggatccacggacccctgctggagccatttgtgcaggccaagctgcggcccgaggacggcctgtacctcattcactggagcaccagccacccctaccgcctgatcctcacagtggcccagcgtagccaggcaccagacggcatgcagagcttgcggctccgaaagttccccattgagcagcaggacggggccttcgtgctggagggctggggccggtccttccccagcgttcgggaacttggggctgccttgcagggctgcttgctgagggccggggatgactgcttctctctgcgtcgctgttgcctgccccaaccaggagaaacctccaatctcatcatcatgcggggggctcgggccagccccaggacactcaacctcagccagctcagcttccaccgggttgaccagaaggagatcacccagctgtcccacttgggccagggcacaaggaccaacgtgtatgagggccgcctgcgagtggagggcagcggggaccctgaggagggcaagatggatgacgaggaccccctcgtgcctggcagggaccgtgggcaggagctacgagtggtgctcaaagtgctggaccctagtcaccatgacatcgccctggccttctacgagacagccagcctcatgagccaggtctcccacacgcacctggccttcgtgcatggcgtctgtgtgcgcggccctgaaaatagcatggtgacagagtacgtggagcacggacccctggatgtgtggctgcggagggagcggggccatgtgcccatggcttggaagatggtggtggcccagcagctggccagcgccctcagctacctggagaacaagaacctggttcatggtaatgtgtgtggccggaacatcctgctggcccggctggggttggcagagggcaccagccccttcatcaagctgagtgatcctggcgtgggcctgggcgccctctccagggaggagcgggtggagaggatcccctggctggcccccgaatgcctaccaggtggggccaacagcctaagcaccgccatggacaagtgggggtttggcgccaccctcctggagatctgctttgacggagaggcccctctgcagagccgcagtccctccgagaaggagcatttctaccagaggcagcaccggctgcccgagccctcctgcccacagctggccacactcaccagccagtgtctgacctatgagccaacccagaggccatcattccgcaccatcctgcgtgacctcacccggctgcagccccacaatcttgctgacgtcttgactgtgaacccggactcaccggcgtcggaccctacggttttccacaagcgctatttgaaaaagatccgagatctgggcgagggtcacttcggcaaggtcagcttgtactgctacgatccgaccaacgacggcactggcgagatggtggcggtgaaagccctcaaggcagactgcggcccccagcaccgctcgggctggaagcaggagattgacattctgcgcacgctctaccacgagcacatcatcaagtacaagggctgctgcgaggaccaaggcgagaagtcgctgcagctggtcatggagtacgtgcccctgggcagcctccgagactacctgccccggcacagcatcgggctggcccagctgctgctcttcgcccagcagatctgcgagggcatggcctatctgcactcgcagcactacatccaccgagacctagccgcgcgcaacgtgctgctggacaacgacaggctggtcaagatcggggactttggcctagccaaggccgtgcccgaaggccacgagtactaccgcgtgcgcgaggatggggacagccccgtgttctggtatgccccagagtgcctgaaggagtataagttctactatgcgtcagatgtctggtccttcggggtgaccctgtatgagctgctgacgcactgtgactccagccagagcccccccacgaaattccttgagctcataggcattgctcagggtcagatgacagttctgagactcactgagttgctggaacgaggggagaggctgccacggcccgacaaatgtccctgtgaggtctatcatctcatgaagaactgctgggagacagaggcgtcctttcgcccaaccttcgagaacctcatacccattctgaagacagtccatgagaagtaccaaggccaggccccttcagtgttcagcgtgtgctga

SEQ ID NO: 782 - DNA, 3445 bp, Homo sapiens
atgcctctgcgccactgggggatggccaggggcagtaagcccgttggggatggagcccagcccatggctgccatgggaggcctgaaggtgcttctgcactgggctggtccaggcggcggggagccctgggtcactttcagtgagtcatcgctgacagctgaggaagtctgcatccacattgcacataaagttggtatcactcctccttgcttcaatctctttgccctcttcgatgctcaggcccaagtctggttgcccccaaaccacatcctagagatccccagagatgcaagcctgatgctatatttccgcataaggttttatttccggaactggcatggcatgaatcctcgggaaccggctgtgtaccgttgtgggcccccaggaaccgaggcatcctcagatcagacagcacaggggatgcaactcctggacccagcctcatttgagtacctctttgagcagggcaagcatgagtttgtgaatgacgtggcatcactgtgggagctgtcgaccgaggaggagatccaccactttaagaatgagagcctgggcatggcctttctgcacctctgtcacctcgctctccgccatggcatccccctggaggaggtggccaagaagaccagcttcaaggactgcatcccgcgctccttccgccggcatatccggcagcacagcgccctgacccggctgcgccttcggaacgtcttccgcaggttcctgcgggacttccagccgggccgactctcccagcagatggtcatggtcaaatacctagccacactcgagcggctggcaccccgcttcggcacagagcgtgtgcccgtgtgccacctgaggctgctggcccaggccgagggggagccctgctacatccgggacagtggggtggcccctacagaccctggccctgagtctgctgctgggcccccaacccacgaggtgctggtgacaggcactggtggcatccagtggtggccagtagaggaggaggtgaacaaggaggagggttctagtggcagcagtggcaggaacccccaagccagcctgtttgggaagaaggccaaggctcacaaggcagtcggccagccggcagacaggccgcgggagccactgtgggcctacttctgtgacttccgggacatcacccacgtggtgctgaaagagcactgtgtcagcatccaccggcaggacaacaagtgcctggagctgagcttgccttcccgggctgcggcgctgtccttcgtgtcgctggtggacggctatttccgcctgacggccgactccagccactacctgtgccacgaggtggctcccccacggctggtgatgagcatccgggatgggatccacggacccctgctggagccatttgtgcaggccaagctgcggcccgaggacggcctgtacctcattcactggagcaccagccacccctaccgcctgatcctcacagtggcccagcgtagccaggcaccagacggcatgcagagcttgcggctccgaaagttccccattgagcagcaggacggggccttcgtgctggagggctggggccggtccttccccagcgttcgggaacttggggctgccttgcagggctgcttgctgagggccggggatgactgcttctctctgcgtcgctgttgcctgccccaaccaggagaaacctccaatctcatcatcatgcggggggctcgggccagccccaggacactcaacctcagccagctcagcttccaccgggttgaccagaaggagatcacccagctgtcccacttgggccagggcacaaggaccaacgtgtatgagggccgcctgcgagtggagggcagcggggaccctgaggagggcaagatggatgacgaggaccccctcgtgcctggcagggaccgtgggcaggagctacgagtggtgctcaaagtgctggaccctagtcaccatgacatcgccctggccttctacgagacagccagcctcatgagccaggtctcccacacgcacctggccttcgtgcatggcgtctgtgtgcgcggccctgaaaatatcatggtgacagagtacgtggagcacggacccctggatgtgtggctgcggagggagcggggccatgtgcccatggcttggaagatggtggtggcccagcagctggccagcgccctcagctacctggagaacaagaacctggttcatggtaatgtgtgtggccggaacatcctgctggcccggctggggttggcagagggcaccagccccttcatcaagctgagtgatcctggcgtgggcctgggcgccctctccagggaggagcgggtggagaggatcccctggctggcccccgaatgcctaccaggtggggccaacagcctaagcaccgccatggacaagtgggggtttggcgccaccctcctggagatctgctttgacggagaggcccctctgcagagccgcagtccctccgagaaggagcatttctaccagaggcagcaccggctgcccgagccctcctgcccacagctggccacactcaccagccagtgtctgacctatgagccaacccagaggccatcattccgcaccatcctgcgtgacctcacccggctgcagccccacaatcttgctgacgtcttgactgtgaacccggactcaccggcgtcggaccctacggttttccacaagcgctatttgaaaaagatccgagatctgggcgagggtcacttcggcaaggtcagcttgtactgctacgatccgaccaacgacggcactggcgagatggtggcggtgaaagccctcaaggcagactgcggcccccagcaccgctcgggctggaagcaggagattgacattctgcgcacgctctaccacgagcacatcatcaagtacaagggctgctgcgaggaccaagggcatggcctatctgcactcgcagcactacatccaccgagacctagccgcgcgcaacgtgctgctggacaacgacaggctggtcaagatcggggactttggcctagccaaggccgtgcccgaaggccacgagtactaccgcgtgcgcgaggatggggacagccccgtgttctggtatgccccagagtgcctgaaggagtataagttctactatgcgtcagatgtctggtccttcggggtgaccctgtatgagctgctgacgcactgtgactccagccagagcccccccacgaaattccttgagctcataggcattgctcagggtcagatgacagttctgagactcactgagttgctggaacgaggggagaggctgccacggcccgacaaatgtccctgtgaggtctatcatctcatgaagaactgctgggagacagaggcgtcctttcgcccaaccttcgagaacctcatacccattctgaagacagtccatgagaagtaccaaggccaggccccttcagtgttcagcgtgtgctga

SEQ ID NO: 783 - DNA, 2673 bp, Homo sapiens
atggcgctgaggcggagcatggggcggccggggctcccgccgctgccgctgccgccgccaccgcggctcgggctgctgctggcggctctggcttctctgctgctcccggagtccgccgccgcaggtctgaagctcatgggagccccggtgaagctgacagtgtctcaggggcagccggtgaagctcaactgcagtgtggaggggatggaggagcctgacatccagtgggtgaaggatggggctgtggtccagaacttggaccagttgtacatcccagtcagcgagcagcactggatcggcttcctcagcctgaagtcagtggagcgctctgacgccggccggtactggtgccaggtggaggatgggggtgaaaccgagatctcccagccagtgtggctcacggtagaaggtgtgccatttttcacagtggagccaaaagatctggcagtgccacccaatgcccctttccaactgtcttgtgaggctgtgggtccccctgaacctgttaccattgtctggtggagaggaactacgaagatcgggggacccgctccctctccatctgttttaaatgtaacaggggtgacccagagcaccatgttttcctgtgaagctcacaacctaaaaggcctggcctcttctcgcacagccactgttcaccttcaagcactgcctgcagcccccttcaacatcaccgtgacaaagctttccagcagcaacgctagtgtggcctggatgccaggtgctgatggccgagctctgctacagtcctgtacagttcaggtgacacaggccccaggaggctgggaagtcctggctgttgtggtccctgtgcccccctttacctgcctgctccgggacctggtgcctgccaccaactacagcctcagggtgcgctgtgccaatgccttggggccctctccctatgctgactgggtgccctttcagaccaagggtctagccccagccagcgctccccaaaacctccatgccatccgcacagattcaggcctcatcttggagtgggaagaagtgaaccccgaggcccctttggaaggccccctgggaccctacaaactgtcctgggttcaagacaatggaacccaggatgagctgacagtggaggggaccagggccaatttgacaggctgggatccccaaaaggacctgatcgtacgtgtgtgcgtctccaatgcagttggctgtggaccctggagtcagccactggtggtctcttctcatgaccgtgcaggccagcagggccctcctcacagccgcacatcctgggtacctgtggtccttggtgtgctaacggccctggtgacggctgctgccctggccctcatcctgcttcgaaagagacggaaagagacgcggtttgggcaagcctttgacagtgtcatggcccggggagagccagccgttcacttccgggcagcccggtccttcaatcgagaaaggcccgagcgcatcgaggccacattggacagcttgggcatcagcgatgaactaaaggaaaaactggaggatgtgctcatcccagagcagcagttcaccctgggccggatgttgggcaaaggagagtttggttcagtgcgggaggcccagctgaagcaagaggatggctcctttgtgaaagtggctgtgaagatgctgaaagctgacatcattgcctcaagcgacattgaagagttcctcagggaagcagcttgcatgaaggagtttgaccatccacacgtggccaaacttgttggggtaagcctccggagcagggctaaaggccgtctccccatccccatggtcatcttgcccttcatgaagcatggggacctgcatgccttcctgctcgcctcccggattggggagaacccctttaacctacccctccagaccctgatccggttcatggtggacattgcctgcggcatggagtacctgagctctcggaacttcatccaccgagacctggctgctcggaattgcatgctggcagaggacatgacagtgtgtgtggctgacttcggactctcccggaagatctacagtggggactactatcgtcaaggctgtgcctccaaactgcctgtcaagtggctggccctggagagcctggccgacaacctgtatactgtgcagagtgacgtgtgggcgttcggggtgaccatgtgggagatcatgacacgtgggcagacgccatatgctggcatcgaaaacgctgagatttacaactacctcattggcgggaaccgcctgaaacagcctccggagtgtatggaggacgtgtatgatctcatgtaccagtgctggagtgctgaccccaagcagcgcccgagctttacttgtctgcgaatggaactggagaacatcttgggccagctgtctgtgctatctgccagccaggaccccttatacatcaacatcgagagagctgaggagcccactgcgggaggcagcctggagctacctggcagggatcagccctacagtggggctggggatggcagtggcatgggggcagtgggtggcactcccagtgactgtcggtacatactcacccccggagggctggctgagcagccagggcaggcagagcaccagccagagagtcccctcaatgagacacagaggcttttgctgctgcagcaagggctactgccacacagtagctgttag

SEQ ID NO: 784 - DNA, 4017 bp, Homo sapiens
atggtcagctactgggacaccggggtcctgctgtgcgcgctgctcagctgtctgcttctcacaggatctagttcaggttcaaaattaaaagatcctgaactgagtttaaaaggcacccagcacatcatgcaagcaggccagacactgcatctccaatgcaggggggaagcagcccataaatggtctttgcctgaaatggtgagtaaggaaagcgaaaggctgagcataactaaatctgcctgtggaagaaatggcaaacaattctgcagtactttaaccttgaacacagctcaagcaaaccacactggcttctacagctgcaaatatctagctgtacctacttcaaagaagaaggaaacagaatctgcaatctatatatttattagtgatacaggtagacctttcgtagagatgtacagtgaaatccccgaaattatacacatgactgaaggaagggagctcgtcattccctgccgggttacgtcacctaacatcactgttactttaaaaaagtttccacttgacactttgatccctgatggaaaacgcataatctgggacagtagaaagggcttcatcatatcaaatgcaacgtacaaagaaatagggcttctgacctgtgaagcaacagtcaatgggcatttgtataagacaaactatctcacacatcgacaaaccaatacaatcatagatgtccaaataagcacaccacgcccagtcaaattacttagaggccatactcttgtcctcaattgtactgctaccactcccttgaacacgagagttcaaatgacctggagttaccctgatgaaaaaaataagagagcttccgtaaggcgacgaattgaccaaagcaattcccatgccaacatattctacagtgttcttactattgacaaaatgcagaacaaagacaaaggactttatacttgtcgtgtaaggagtggaccatcattcaaatctgttaacacctcagtgcatatatatgataaagcattcatcactgtgaaacatcgaaaacagcaggtgcttgaaaccgtagctggcaagcggtcttaccggctctctatgaaagtgaaggcatttccctcgccggaagttgtatggttaaaagatgggttacctgcgactgagaaatctgctcgctatttgactcgtggctactcgttaattatcaaggacgtaactgaagaggatgcagggaattatacaatcttgctgagcataaaacagtcaaatgtgtttaaaaacctcactgccactctaattgtcaatgtgaaaccccagatttacgaaaaggccgtgtcatcgtttccagacccggctctctacccactgggcagcagacaaatcctgacttgtaccgcatatggtatccctcaacctacaatcaagtggttctggcacccctgtaaccataatcattccgaagcaaggtgtgacttttgttccaataatgaagagtcctttatcctggatgctgacagcaacatgggaaacagaattgagagcatcactcagcgcatggcaataatagaaggaaagaataagatggctagcaccttggttgtggctgactctagaatttctggaatctacatttgcatagcttccaataaagttgggactgtgggaagaaacataagcttttatatcacagatgtgccaaatgggtttcatgttaacttggaaaaaatgccgacggaaggagaggacctgaaactgtcttgcacagttaacaagttcttatacagagacgttacttggattttactgcggacagttaataacagaacaatgcactacagtattagcaagcaaaaaatggccatcactaaggagcactccatcactcttaatcttaccatcatgaatgtttccctgcaagattcaggcacctatgcctgcagagccaggaatgtacacacaggggaagaaatcctccagaagaaagaaattacaatcagagatcaggaagcaccatacctcctgcgaaacctcagtgatcacacagtggccatcagcagttccaccactttagactgtcatgctaatggtgtccccgagcctcagatcacttggtttaaaaacaaccacaaaatacaacaagagcctggaattattttaggaccaggaagcagcacgctgtttattgaaagagtcacagaagaggatgaaggtgtctatcactgcaaagccaccaaccagaagggctctgtggaaagttcagcatacctcactgttcaaggaacctcggacaagtctaatctggagctgatcactctaacatgcacctgtgtggctgcgactctcttctggctcctattaaccctccttatccgaaaaatgaaaaggtcttcttctgaaataaagactgactacctatcaattataatggacccagatgaagttcctttggatgagcagtgtgagcggctcccttatgatgccagcaagtgggagtttgcccgggagagacttaaactgggcaaatcacttggaagaggggcttttggaaaagtggttcaagcatcagcatttggcattaagaaatcacctacgtgccggactgtggctgtgaaaatgctgaaagagggggccacggccagcgagtacaaagctctgatgactgagctaaaaatcttgacccacattggccaccatctgaacgtggttaacctgctgggagcctgcaccaagcaaggagggcctctgatggtgattgttgaatactgcaaatatggaaatctctccaactacctcaagagcaaacgtgacttattttttctcaacaaggatgcagcactacacatggagcctaagaaagaaaaaatggagccaggcctggaacaaggcaagaaaccaagactagatagcgtcaccagcagcgaaagctttgcgagctccggctttcaggaagataaaagtctgagtgatgttgaggaagaggaggattctgacggtttctacaaggagcccatcactatggaagatctgatttcttacagttttcaagtggccagaggcatggagttcctgtcttccagaaagtgcattcatcgggacctggcagcgagaaacattcttttatctgagaacaacgtggtgaagatttgtgattttggccttgcccgggatatttataagaaccccgattatgtgagaaaaggagatactcgacttcctctgaaatggatggctcccgaatctatctttgacaaaatctacagcaccaagagcgacgtgtggtcttacggagtattgctgtgggaaatcttctccttaggtgggtctccatacccaggagtacaaatggatgaggacttttgcagtcgcctgagggaaggcatgaggatgagagctcctgagtactctactcctgaaatctatcagatcatgctggactgctggcacagagacccaaaagaaaggccaagatttgcagaacttgtggaaaaactaggtgatttgcttcaagcaaatgtacaacaggatggtaaagactacatcccaatcaatgccatactgacaggaaatagtgggtttacatactcaactcctgccttctctgaggacttcttcaaggaaagtatttcagctccgaagtttaattcaggaagctctgatgatgtcagatatgtaaatgctttcaagttcatgagcctggaaagaatcaaaacctttgaagaacttttaccgaatgccacctccatgtttgatgactaccagggcgacagcagcactctgttggcctctcccatgctgaagcgcttcacctggactgacagcaaacccaaggcctcgctcaagattgacttgagagtaaccagtaaaagtaaggagtcggggctgtctgatgtcagcaggcccagtttctgccattccagctgtgggcacgtcagcgaaggcaagcgcaggttcacctacgaccacgctgagctggaaaggaaaatcgcgtgctgctccccgcccccagactacaactcggtggtcctgtactccaccccacccatctag

SEQ ID NO: 785 - DNA, 4017 bp, Homo sapiens
atggtcagctactgggacaccggggtcctgctgtgcgcgctgctcagctgtctgcttctcacaggatctagttcaggttcaaaattaaaagatcctgaactgagtttaaaaggcacccagcacatcatgcaagcaggccagacactgcatctccaatgcaggggggaagcagcccataaatggtctttgcctgaaatggtgagtaaggaaagcgaaaggctgagcataactaaatctgcctgtggaagaaatggcaaacaattctgcagtactttaaccttgaacacagctcaagcaaaccacactggcttctacagctgcaaatatctagctgtacctacttcaaagaagaaggaaacagaatctgcaatctatatatttattagtgatacaggtagacctttcgtagagatgtacagtgaaatccccgaaattatacacatgactgaaggaagggagctcgtcattccctgccgggttacgtcacctaacatcactgttactttaaaaaagtttccacttgacactttgatccctgatggaaaacgcataatctgggacagtagaaagggcttcatcatatcaaatgcaacgtacaaagaaatagggcttctgacctgtgaagcaacagtcaatgggcatttgtataagacaaactatctcacacatcgacaaaccaatacaatcatagatgtccaaataagcacaccacgcccagtcaaattacttagaggccatactcttgtcctcaattgtactgctaccactcccttgaacacgagagttcaaatgacctggagttaccctgatgaaaaaaataagagagcttccgtaaggcgacgaattgaccaaagcaattcccatgccaacatattctacagtgttcttactattgacaaaatgcagaacaaagacaaaggactttatacttgtcgtgtaaggagtggaccatcattcaaatctgttaacacctcagtgcatatatatgataaagcattcatcactgtgaaacatcgaaaacagcaggtgcttgaaaccgtagctggcaagcggtcttaccggctctctatgaaagtgaaggcatttccctcgccggaagttgtatggttaaaagatgggttacctgcgactgagaaatctgctcgctatttgactcgtggctactcgttaattatcaaggacgtaactgaagaggatgcagggaattatacaatcttgctgagcataaaacagtcaaatgtgtttaaaaacctcactgccactctaattgtcaatgtgaaaccccagatttacgaaaaggccgtgtcatcgtttccagacccggctctctacccactgggcagcagacaaatcctgacttgtaccgcatatggtatccctcaacctacaatcaagtggttctggcacccctgtaaccataatcattccgaagcaaggtgtgacttttgttccaataatgaagagtcctttatcctggatgctgacagcaacatgggaaacagaattgagagcatcactcagcgcatggcaataatagaaggaaagaataagatggctagcaccttggttgtggctgactctagaatttctggaatctacatttgcatagcttccaataaagttgggactgtgggaagaaacataagcttttatatcacagatgtgccaaatgggtttcatgttaacttggaaaaaatgccgacggaaggagaggacctgaaactgtcttgcacagttaacaagttcttatacagagacgttacttggattttactgcggacagttaataacagaacaatgcactacagtattagcaagcaaaaaatggccatcactaaggagcactccatcactcttaatcttaccatcatgaatgtttccctgcaagattcaggcacctatgcctgcagagccaggaatgtatacacaggggaagaaatcctccagaagaaagaaattacaatcagagatcaggaagcaccatacctcctgcgaaacctcagtgatcacacagtggccatcagcagttccaccactttagactgtcatgctaatggtgtccccgagcctcagatcacttggtttaaaaacaaccacaaaatacaacaagagcctggaattattttaggaccaggaagcagcacgctgtttattgaaagagtcacagaagaggatgaaggtgtctatcactgcaaagccaccaaccagaagggctctgtggaaagttcagcatacctcactgttcaaggaacctcggacaagtctaatctggagctgatcactctaacatgcacctgtgtggctgcgactctcttctggctcctattaaccctccttatccgaaaaatgaaaaggtcttcttctgaaataaagactgactacctatcaattataatggacccagatgaagttcctttggatgagcagtgtgagcggctcccttatgatgccagcaagtgggagtttgcccgggagagacttaaactgggcaaatcacttggaagaggggcttttggaaaagtggttcaagcatcagcatttggcattaagaaatcacctacgtgccggactgtggctgtgaaaatgctgaaagagggggccacggccagcgagtacaaagctctgatgactgagctaaaaatcttgacccacattggccaccatctgaacgtggttaacctgctgggagcctgcaccaagcaaggagggcctctgatggtgattgttgaatactgcaaatatggaaatctctccaactacctcaagagcaaacgtgacttattttttctcaacaaggatgcagcactacacatggagcctaagaaagaaaaaatggagccaggcctggaacaaggcaagaaaccaagactagatagcgtcaccagcagcgaaagctttgcgagctccggctttcaggaagataaaagtctgagtgatgttgaggcagaggaggattctgacggtttctacaaggagcccatcactatggaagatctgatttcttacagttttcaagtggccagaggcatggagttcctgtcttccagaaagtgcattcatcgggacctggcagcgagaaacattcttttatctgagaacaacgtggtgaagatttgtgattttggccttgcccgggatatttataagaaccccgattatgtgagaaaaggagatactcgacttcctctgaaatggatggctcccgaatctatctttgacaaaatctacagcaccaagagcgacgtgtggtcttacggagtattgctgtgggaaatcttctccttaggtgggtctccatacccaggagtacaaatggatgaggacttttgcagtcgcctgagggaaggcatgaggatgagagctcctgagtactctactcctgaaatctatcagatcatgctggactgctggcacagagacccaaaagaaaggccaagatttgcagaacttgtggaaaaactaggtgatttgcttcaagcaaatgtacaacaggatggtaaagactacatcccaatcaatgccatactgacaggaaatagtgggtttacatactcaactcctgccttctctgaggacttcttcaaggaaagtatttcagctccgaagtttaattcaggaagctctgatgatgtcagatatgtaaatgctttcaagttcatgagcctggaaagaatcaaaacctttgaagaacttttaccgaatgccacctccatgtttgatgactaccagggcgacagcagcactctgttggcctctcccatgctgaagcgcttcacctggactgacagcaaacccaaggcctcgctcaagattgacttgagagtaaccagtaaaagtaaggagtcggggctgtctgatgtcagcaggcccagtttctgccattccagctgtgggcacgtcagcgaaggcaagcgcaggttcacctacgaccacgctgagctggaaaggaaaatcgcgtgctgctccccgcccccagactacaactcggtggtcctgtactccaccccacccatctag

SEQ ID NO: 786 - DNA, 4017 bp, Homo sapiens
atggtcagctactgggacaccggggtcctgctgtgcgcgctgctcagctgtctgcttctcacaggatctagttcaggttcaaaattaaaagatcctgaactgagtttaaaaggcacccagcacatcatgcaagcaggccagacactgcatctccaatgcaggggggaagcagcccataaatggtctttgcctgaaatggtgagtaaggaaagcgaaaggctgagcataactaaatctgcctgtggaagaaatggcaaacaattctgcagtactttaaccttgaacacagctcaagcaaaccacactggcttctacagctgcaaatatctagctgtacctacttcaaagaagaaggaaacagaatctgcaatctatatatttattagtgatacaggtagacctttcgtagagatgtacagtgaaatccccgaaattatacacatgactgaaggaagggagctcgtcattccctgccgggttacgtcacctaacatcactgttactttaaaaaagtttccacttgacactttgatccctgatggaaaacgcataatctgggacagtagaaagggcttcatcatatcaaatgcaacgtacaaagaaatagggcttctgacctgtgaagcaacagtcaatgggcatttgtataagacaaactatctcacacatcgacaaaccaatacaatcatagatgtccaaataagcacaccacgcccagtcaaattacttagaggccatactcttgtcctcaattgtactgctaccactcccttgaacacgagagttcaaatgacctggagttaccctgatgaaaaaaataagagagcttccgtaaggcgacgaattgaccaaagcaattcccatgccaacatattctacagtgttcttactattgacaaaatgcagaacaaagacaaaggactttatacttgtcgtgtaaggagtggaccatcattcaaatctgttaacacctcagtgcatatatatgataaagcattcatcactgtgaaacatcgaaaacagcaggtgcttgaaaccgtagctggcaagcggtcttaccggctctctatgaaagtgaaggcatttccctcgccggaagttgtatggttaaaagatgggttacctgcgactgagaaatctgctcgctatttgactcgtggctactcgttaattatcaaggacgtaactgaagaggatgcagggaattatacaatcttgctgagcataaaacagtcaaatgtgtttaaaaacctcactgccactctaattgtcaatgtgaaaccccagatttacgaaaaggccgtgtcatcgtttccagacccggctctctacccactgggcagcagacaaatcctgacttgtaccgcatatggtatccctcaacctacaatcaagtggttctggcacccctgtaaccataatcattccgaagcaaggtgtgacttttgttccaataatgaagagtcctttatcctggatgctgacagcaacatgggaaacagaattgagagcatcactcagcgcatggcaataatagaaggaaagaataagatggctagcaccttggttgtggctgactctagaatttctggaatctacatttgcatagcttccaataaagttgggactgtgggaagaaacataagcttttatatcacagatgtgccaaatgggtttcatgttaacttggaaaaaatgccgacggaaggagaggacctgaaactgtcttgcacagttaacaagttcttatacagagacgttacttggattttactgcggacagttaataacagaacaatgcactacagtattagcaagcaaaaaatggccatcactaaggagcactccatcactcttaatcttaccatcatgaatgtttccctgcaagattcaggcacctatgcctgcagagccaggaatgtatacacaggggaagaaatcctccagaagaaagaaattacaatcagagatcaggaagcaccatacctcctgcgaaacctcagtgatcacacagtggccatcagcagttccaccactttagactgtcatgctaatggtgtccccgagcctcagatcacttggtttaaaaacaaccacaaaatacaacaagagcctggaattattttaggaccaggaagcagcacgctgtttattgaaagagtcacagaagaggatgaaggtgtctatcactgcaaagccaccaaccagaagggctctgtggaaagttcagcatacctcactgttcaaggaacctcggacaagtctaatctggagctgatcactctaacatgcacctgtgtggctgcgactctcttctggctcctattaaccctccttatccgaaaaatgaaaaggtcttcttctgaaataaagactgactacctatcaattataatggacccagatgaagttcctttggatgagcagtgtgagcggctcccttatgatgccagcaagtgggagtttgcccgggagagacttaaactgggcaaatcacttggaagaggggcttttggaaaagtggttcaagcatcagcatttggcattaagaaatcacctacgtgccggactgtggctgtgaaaatgctgaaagagggggccacggccagcgagtacaaagctctgatgactgagctaaaaatcttgacccacattggccaccatctgaacgtggttaacctgctgggagcctgcaccaagcaaggagggcctctgatggtgattgttgaatactgcaaatatggaaatctctccaactacctcaagagcaaacgtgacttattttttctcaacaaggatgcagcactacacatggagcctaagaaagaaaaaatggagccaggcctggaacaaggcaagaaaccaagactagatagcgtcaccagcagcgaaagctttgcgagctccggctttcaggaagataaaagtctgagtgatgttgaggaagaggaggattctgacggtttctacaaggagcccatcactatggaagatctgatttcttacagttttcaagtggccagaggcatggagttcctgtcttccagaaagtgcattcatcgggacctggcagcgagaaacattcttttatctgagaacaacgtggtgaagatttgtgattttggccttgcccgggatatttataagaaccccgattatgtgagaaaaggagatactcgacttcctctgaaatggatggctcccgaatctatctttgacaaaatctacagcaccaagagcgacgtgtggtcttacggagtattgctgtgggaaatcttctccttaggtgggtctccatacccaggagtacaaatggatgaggacttttgcagtcgcctgagggaaggcatgaggatgagagctcctgagtactctactcctgaaatctatcagatcatgctggactgctggcacagagacccaaaagaaaggccaagatttgcagaacttgtggaaaaactaggtgatttgcttcaagcaaatgtacaacaggatggtaaagactacatcccaatcaatgccatactgacaggaaatagtgggtttacatactcaactcctgccttctctgaggacttcttcaaggaaagtatttcagctctgaagtttaattcaggaagctctgatgatgtcagatatgtaaatgctttcaagttcatgagcctggaaagaatcaaaacctttgaagaacttttaccgaatgccacctccatgtttgatgactaccagggcgacagcagcactctgttggcctctcccatgctgaagcgcttcacctggactgacagcaaacccaaggcctcgctcaagattgacttgagagtaaccagtaaaagtaaggagtcggggctgtctgatgtcagcaggcccagtttctgccattccagctgtgggcacgtcagcgaaggcaagcgcaggttcacctacgaccacgctgagctggaaaggaaaatcgcgtgctgctccccgcccccagactacaactcggtggtcctgtactccaccccacccatctag

SEQ ID NO: 787 - DNA, 4071 bp, Homo sapiens
atgcagagcaaggtgctgctggccgtcgccctgtggctctgcgtggagacccgggccgcctctgtgggtttgcctagtgtttctcttgatctgcccaggctcagcatacaaaaagacatacttacaattaaggctaatacaactcttcaaattacttgcaggggacagagggacttggactggctttggcccaataatcagagtggcagtgagcaaagggtggaggtgactgagtgcagcgatggcctcttctgtaagacactcacaattccaaaagtgatcggaaatgacactggagcctacaagtgcttctaccgggaaactgacttggcctcggtcatttatgtctatgttcaagattacagatctccatttattgcttctgttagtgaccaacatggagtcgtgtacattactgagaacaaaaacaaaactgtggtgattccatgtctcgggtccatttcaaatctcaacgtgtcactttgtgcaagatacccagaaaagagatttgttcctgatggtaacagaatttcctgggacagcaagaagggctttactattcccagctacatgatcagctatgctggcatggtcttctgtgaagcaaaaattaatgatgaaagttaccagtctattatgtacatagttgtcgttgtagggtataggatttatgatgtggttctgagtccgtctcatggaattgaactatctgttggagaaaagcttgtcttaaattgtacagcaagaactgaactaaatgtggggattgacttcaactgggaatacccttcttcgaagcatcagcataagaaacttgtaaaccgagacctaaaaacccagtctgggagtgagatgaagaaatttttgagcaccttaactatagatggtataacccggagtgaccaaggattgtacacctgtgcagcatccagtgggctgatgaccaagaagaacagcacatttgtcagggtccatgaaaaaccttttgttgcttttggaagtggcatggaatctctggtggaagccacggtgggggagcgtgtcagaatccctgcgaagtaccttggttacccacccccagaaataaaatggtataaaaatggaataccccttgagtccaatcacacaattaaagcggggcatgtactgacgattatggaagtgagtgaaagagacacaggaaattacactgtcatccttaccaatcccatttcaaaggagaagcagagccatgtggtctctctggttgtgtatgtcccaccccagattggtgagaaatctctaatctctcctgtggattcctaccagtacggcaccactcaaacgctgacatgtacggtctatgccattcctcccccgcatcacatccactggtattggcagttggaggaagagtgcgccaacgagcccagccaagctgtctcagtgacaaacccatacccttgtgaagaatggagaagtgtggaggacttccagggaggaaataaaattgaagttaataaaaatcaatttgctctaattgaaggaaaaaacaaaactgtaagtacccttgttatccaagcggcaaatgtgtcagctttgtacaaatgtgaagcggtcaacaaagtcgggagaggagagagggtgatctccttccacgtgaccaggggtcctgaaattactttgcaacctgacatgcagcccactgagcaggagagcgtgtctttgtggtgcactgcagacagatctacgtttgagaacctcacatggtacaagcttggcccacagcctctgccaatccatgtgggagagttgcccacacctgtttgcaagaacttggatactctttggaaattgaatgccaccatgttctctaatagcacaaatgacattttgatcatggagcttaagaatgcatccttgcaggaccaaggagactatgtctgccttgctcaagacaggaagaccaagaaaagacattgcgtggtcaggcagctcacagtcctagagcgtgtggcacccacgatcacaggaaacctggagaatcagacgacaagtattggggaaagcatcgaagtctcatgcacggcatctgggaatccccctccacagatcatgtggtttaaagataatgagacccttgtagaagactcaggcattgtattgaaggatgggaaccggaacctcactatccgcagagtgaggaaggaggacgaaggcctctacacctgccaggcatgcagtgttcttggctgtgcaaaagtggaggcatttttcataatagaaggtgcccaggaaaagacgaacttggaaatcattattctagtaggcacggcggtgattgccatgttcttctggctacttcttgtcatcatcctacggaccgttaagcgggccaatggaggggaactgaagacaggctacttgtccatcgtcatggatccagatgaactcccattggatgaacattgtgaacgactgccttatgatgccagcaaatgggaattccccagagaccggctgaagctaggtaagcctcttggccgtggtgcctttggccaagtgattgaagcagatgcctttggaattgacaagacagcaacttgcaggacagtagcagtcaaaatgttgaaagaaggagcaacacacagtgagcatcgagctctcatgtctgaactcaagatcctcattcatattggtcaccatctcaatgtggtcaaccttctaggtgcctgtaccaagccaggagggccactcatggtgattgtggaattctgcaaatttggaaacctgtccacttacctgaggagcaagagaaatgaatttgtcccctacaagaccaaaggggcacgattccgtcaagggaaagactacgttggagcaatccctgtggatctgaaacggcgcttggacagcatcaccagtagccagagctcagccagctctggatttgtggaggagaagtccctcagtgatgtagaagaagaggaagctcctgaagatctgtataaggacttcctgaccttggagcatctcatctgttacagcttccaagtggctaagggcatggagttcttggcatcgcgaaagtgtatccacagggacctggcggcacgaaatatcctcttatcggagaagaacgtggttaaaatctgtgactttggcttggcccgggatatttataaagatccagattatgtcagaaaaggagatgctcgcctccctttgaaatggatggccccagaaacaatttttgacagagtgtacacaatccagagtgacgtctggtcttttggtgttttgctgtgggaaatattttccttaggtgcttctccatatcctggggtaaagattgatgaagaattttgtaggcgattgaaagaaggaactagaatgagggcccctgattatactacaccagaaatgtaccagaccatgctggactgctggcacggggagcccagtcagagacccacgttttcagagttggtggaacatttgggaaatctcttgcaagctaatgctcagcaggatggcaaagactacattgttcttccgatatcagagactttgagcatggaagaggattctggactctctctgcctacctcacctgtttcctgtatggaggaggaggaagtatgtgaccccaaattccattatgacaacacagcaggaatcagtcagtatctgcagaacagtaagcgaaagagccggcctgtgagtgtaaaaacatttgaagatatcccgttagaagaaccagaagtaaaagtaatcccagatgacaaccagacggacagtggtatggttcttgcctcagaagagctgaaaactttggaagacagaaccaaattatctccatcttttggtggaatggtgcccagcaaaagcagggagtctgtggcatctgaaggctcaaaccagacaagcggctaccagtccggatatcactccgatgacacagacaccaccgtgtactccagtgaggaagcagaacttttaaagctgatagagattggagtgcaaaccggtagcacagcccagattctccagcctgactcggggaccacactgagctctcctcctgtttaa

SEQ ID NO: 788 - DNA, 4071 bp, Homo sapiens
atgcagagcaaggtgctgctggccgtcgccctgtggctctgcgtggagacccgggccgcctctgtgggtttgcctagtgtttctcttgatctgcccaggctcagcatacaaaaagacatacttacaattaaggctaatacaactcttcaaattacttgcaggggacagagggacttggactggctttggcccaataatcagagtggcagtgagcaaagggtggaggtgactgagtgcagcgatggcctcttctgtaagacactcacaattccaaaagtgatcggaaatgacactggagcctacaagtgcttctaccgggaaactgacttggcctcggtcatttatgtctatgttcaagattacagatctccatttattgcttctgttagtgaccaacatggagtcgtgtacattactgagaacaaaaacaaaactgtggtgattccatgtctcgggtccatttcaaatctcaacgtgtcactttgtgcaagatacccagaaaagagatttgttcctgatggtaacagaatttcctgggacagcaagaagggctttactattcccagctacatgatcagctatgctggcatggtcttctgtgaagcaaaaattaatgatgaaagttaccagtctattatgtacatagttgtcgttgtagggtataggatttatgatgtggttctgagtccgtctcatggaattgaactatctgttggagaaaagcttgtcttaaattgtacagcaagaactgaactaaatgtggggattgacttcaactgggaatacccttcttcgaagcatcagcataagaaacttgtaaaccgagacctaaaaacccagtctgggagtgagatgaagaaatttttgagcaccttaactatagatggtgtaacccggagtgaccaaggattgtacacctgtgcagcatccagtgggctgatgaccaagaagaacagcacatttgtcagggtccatgaaaaaccttttgttgcttttggaagtggcatggaatctctggtggaagccacggtgggggagcgtgtcagaatccctgcgaagtaccttggttacccacccccagaaataaaatggtataaaaatggaataccccttgagtccaatcacacaattaaagcggggcatgtactgacgattatggaagtgagtgaaagagacacaggaaattacactgtcatccttaccaatcccatttcaaaggagaagcagagccatgtggtctctctggttgtgtatgtcccaccccagattggtgagaaatctctaatctctcctgtggattcctaccagtacggcaccactcaaacgctgacatgtacggtctatgccattcctcccccgcatcacatccactggtattggcagttggaggaagagtgcgccaacgagcccagccatgctgtctcagtgacaaacccatacccttgtgaagaatggagaagtgtggaggacttccagggaggaaataaaattgaagttaataaaaatcaatttgctctaattgaaggaaaaaacaaaactgtaagtacccttgttatccaagcggcaaatgtgtcagctttgtacaaatgtgaagcggtcaacaaagtcgggagaggagagagggtgatctccttccacgtgaccaggggtcctgaaattactttgcaacctgacatgcagcccactgagcaggagagcgtgtctttgtggtgcactgcagacagatctacgtttgagaacctcacatggtacaagcttggcccacagcctctgccaatccatgtgggagagttgcccacacctgtttgcaagaacttggatactctttggaaattgaatgccaccatgttctctaatagcacaaatgacattttgatcatggagcttaagaatgcatccttgcaggaccaaggagactatgtctgccttgctcaagacaggaagaccaagaaaagacattgcgtggtcaggcagctcacagtcctagagcgtgtggcacccacgatcacaggaaacctggagaatcagacgacaagtattggggaaagcatcgaagtctcatgcacggcatctgggaatccccctccacagatcatgtggtttaaagataatgagacccttgtagaagactcaggcattgtattgaaggatgggaaccggaacctcactatccgcagagtgaggaaggaggacgaaggcctctacacctgccaggcatgcagtgttcttggctgtgcaaaagtggaggcatttttcataatagaaggtgcccaggaaaagacgaacttggaaatcattattctagtaggcacggcggtgattgccatgttcttctggctacttcttgtcatcatcctacggaccgttaagcgggccaatggaggggaactgaagacaggctacttgtccatcgtcatggatccagatgaactcccattggatgaacattgtgaacgactgccttatgatgccagcaaatgggaattccccagagaccggctgaagctaggtaagcctcttggccgtggtgcctttggccaagtgattgaagcagatgcctttggaattgacaagacagcaacttgcaggacagtagcagtcaaaatgttgaaagaaggagcaacacacagtgagcatcgagctctcatgtctgaactcaagatcctcattcatattggtcaccatctcaatgtggtcaaccttctaggtgcctgtaccaagccaggagggccactcatggtgattgtggaattctgcaaatttggaaacctgtccacttacctgaggagcaagagaaatgaatttgtcccctacaagaccaaaggggcacgattccgtcaagggaaagactacgttggagcaatccctgtggatctgaaacggcgcttggacagcatcaccagtagccagagctcagccagctctggatttgtggaggagaagtccctcagtgatgtagaagaagaggaagctcctgaagatctgtataaggacttcctgaccttggagcatctcatctgttacagcttccaagtggctaagggcatggagttcttggcatcgcgaaagtgtatccacagggacctggcggcacgaaatatcctcttatcggagaagaacgtggttaaaatctgtgactttggcttggcccgggatatttataaagatccagattatgtcagaaaaggagatgctcgcctccctttgaaatggatggccccagaaacaatttttgacagagtgtacacaatccagagtgacgtctggtcttttggtgttttgctgtgggaaatattttccttaggtgcttctccatatcctggggtaaagattgatgaagaattttgtaggcgattgaaagaaggaactagaatgagggcccctgattatactacaccagaaatgtaccagaccatgctggactgctggcacggggagcccagtcagagacccacgttttcagagttggtggaacatttgggaaatctcttgcaagctaatgctcagcaggatggcaaagactacattgttcttccgatatcagagactttgagcatggaagaggattctggactctctctgcctacctcacctgtttcctgtatggaggaggaggaagtatgtgaccccaaattccattatgacaacacagcaggaatcagtcagtatctgcagaacagtaagcgaaagagccggcctgtgagtgtaaaaacatttgaagatatcccgttagaagaaccagaagtaaaagtaatcccagatgacaaccagacggacagtggtatggttcttgcctcagaagagctgaaaactttggaagacagaaccaaattatctccatcttttggtggaatggtgcccagcaaaagcagggagtctgtggcatctgaaggctcaaaccagacaagcggctaccagtccggatatcactccgatgacacagacaccaccgtgtactccagtgaggaagcagaacttttaaagctgatagagattggagtgcaaaccggtagcacagcccagattctccagcctgactcggggaccacactgagctctcctcctgtttaa

SEQ ID NO: 789 - DNA, 4071 bp, Homo sapiens
atgcagagcaaggtgctgctggccgtcgccctgtggctctgcgtggagacccgggccgcctctgtgggtttgcctagtgtttctcttgatctgcccaggctcagcatacaaaaagacatacttacaattaaggctaatacaactcttcaaattacttgcaggggacagagggacttggactggctttggcccaataatcagagtggcagtgagcaaagggtggaggtgactgagtgcagcgatggcctcttctgtaagacactcacaattccaaaagtgatcggaaatgacactggagcctacaagtgcttctaccgggaaactgacttggcctcggtcatttatgtctatgttcaagattacagatctccatttattgcttctgttagtgaccaacatggagtcgtgtacattactgagaacaaaaacaaaactgtggtgattccatgtctcgggtccatttcaaatctcaacgtgtcactttgtgcaagatacccagaaaagagatttgttcctgatggtaacagaatttcctgggacagcaagaagggctttactattcccagctacatgatcagctatgctggcatggtcttctgtgaagcaaaaattaatgatgaaagttaccagtctattatgtacatagttgtcgttgtagggtataggatttatgatgtggttctgagtccgtctcatggaattgaactatctgttggagaaaagcttgtcttaaattgtacagcaagaactgaactaaatgtggggattgacttcaactgggaatacccttcttcgaagcatcagcataagaaacttgtaaaccgagacctaaaaacccagtctgggagtgagatgaagaaatttttgagcaccttaactatagatggtgtaacccggagtgaccaaggattgtacacctgtgcagcatccagtgggctgatgaccaagaagaacagcacatttgtcagggtccatgaaaaaccttttgttgcttttggaagtggcatggaatctctggtggaagccacggtgggggagcgtgtcagaatccctgcgaagtaccttggttacccacccccagaaataaaatggtataaaaatggaataccccttgagtccaatcacacaattaaagcggggcatgtactgacgattatggaagtgagtgaaagagacacaggaaattacactgtcatccttaccaatcccatttcaaaggagaagcagagccatgtggtctctctggttgtgtatgtcccaccccagattggtgagaaatctctaatctctcctgtggattcctaccagtacggcaccactcaaacgctgacatgtacggtctatgccattcctcccccgcatcacatccactggtattggcagttggaggaagagtgcgccaacgagcccagccaagctgtctcagtgacaaacccataccctcgtgaagaatggagaagtgtggaggacttccagggaggaaataaaattgaagttaataaaaatcaatttgctctaattgaaggaaaaaacaaaactgtaagtacccttgttatccaagcggcaaatgtgtcagctttgtacaaatgtgaagcggtcaacaaagtcgggagaggagagagggtgatctccttccacgtgaccaggggtcctgaaattactttgcaacctgacatgcagcccactgagcaggagagcgtgtctttgtggtgcactgcagacagatctacgtttgagaacctcacatggtacaagcttggcccacagcctctgccaatccatgtgggagagttgcccacacctgtttgcaagaacttggatactctttggaaattgaatgccaccatgttctctaatagcacaaatgacattttgatcatggagcttaagaatgcatccttgcaggaccaaggagactatgtctgccttgctcaagacaggaagaccaagaaaagacattgcgtggtcaggcagctcacagtcctagagcgtgtggcacccacgatcacaggaaacctggagaatcagacgacaagtattggggaaagcatcgaagtctcatgcacggcatctgggaatccccctccacagatcatgtggtttaaagataatgagacccttgtagaagactcaggcattgtattgaaggatgggaaccggaacctcactatccgcagagtgaggaaggaggacgaaggcctctacacctgccaggcatgcagtgttcttggctgtgcaaaagtggaggcatttttcataatagaaggtgcccaggaaaagacgaacttggaaatcattattctagtaggcacggcggtgattgccatgttcttctggctacttcttgtcatcatcctacggaccgttaagcgggccaatggaggggaactgaagacaggctacttgtccatcgtcatggatccagatgaactcccattggatgaacattgtgaacgactgccttatgatgccagcaaatgggaattccccagagaccggctgaagctaggtaagcctcttggccgtggtgcctttggccaagtgattgaagcagatgcctttggaattgacaagacagcaacttgcaggacagtagcagtcaaaatgttgaaagaaggagcaacacacagtgagcatcgagctctcatgtctgaactcaagatcctcattcatattggtcaccatctcaatgtggtcaaccttctaggtgcctgtaccaagccaggagggccactcatggtgattgtggaattctgcaaatttggaaacctgtccacttacctgaggagcaagagaaatgaatttgtcccctacaagaccaaaggggcacgattccgtcaagggaaagactacgttggagcaatccctgtggatctgaaacggcgcttggacagcatcaccagtagccagagctcagccagctctggatttgtggaggagaagtccctcagtgatgtagaagaagaggaagctcctgaagatctgtataaggacttcctgaccttggagcatctcatctgttacagcttccaagtggctaagggcatggagttcttggcatcgcgaaagtgtatccacagggacctggcggcacgaaatatcctcttatcggagaagaacgtggttaaaatctgtgactttggcttggcccgggatatttataaagatccagattatgtcagaaaaggagatgctcgcctccctttgaaatggatggccccagaaacaatttttgacagagtgtacacaatccagagtgacgtctggtcttttggtgttttgctgtgggaaatattttccttaggtgcttctccatatcctggggtaaagattgatgaagaattttgtaggcgattgaaagaaggaactagaatgagggcccctgattatactacaccagaaatgtaccagaccatgctggactgctggcacggggagcccagtcagagacccacgttttcagagttggtggaacatttgggaaatctcttgcaagctaatgctcagcaggatggcaaagactacattgttcttccgatatcagagactttgagcatggaagaggattctggactctctctgcctacctcacctgtttcctgtatggaggaggaggaagtatgtgaccccaaattccattatgacaacacagcaggaatcagtcagtatctgcagaacagtaagcgaaagagccggcctgtgagtgtaaaaacatttgaagatatcccgttagaagaaccagaagtaaaagtaatcccagatgacaaccagacggacagtggtatggttcttgcctcagaagagctgaaaactttggaagacagaaccaaattatctccatcttttggtggaatggtgcccagcaaaagcagggagtctgtggcatctgaaggctcaaaccagacaagcggctaccagtccggatatcactccgatgacacagacaccaccgtgtactccagtgaggaagcagaacttttaaagctgatagagattggagtgcaaaccggtagcacagcccagattctccagcctgactcggggaccacactgagctctcctcctgtttaa

SEQ ID NO: 790 - DNA, 4071 bp, Homo sapiens
atgcagagcaaggtgctgctggccgtcgccctgtggctctgcgtggagacccgggccgcctctgtgggtttgcctagtgtttctcttgatctgcccaggctcagcatacaaaaagacatacttacaattaaggctaatacaactcttcaaattacttgcaggggacagagggacttggactggctttggcccaataatcagagtggcagtgagcaaagggtggaggtgactgagtgcagcgatggcctcttctgtaagacactcacaattccaaaagtgatcggaaatgacactggagcctacaagtgcttctaccgggaaactgacttggcctcggtcatttatgtctatgttcaagattacagatctccatttattgcttctgttagtgaccaacatggagtcgtgtacattactgagaacaaaaacaaaactgtggtgattccatgtctcgggtccatttcaaatctcaacgtgtcactttgtgcaagatacccagaaaagagatttgttcctgatggtaacagaatttcctgggacagcaagaagggctttactattcccagctacatgatcagctatgctggcatggtcttctgtgaagcaaaaattaatgatgaaagttaccagtctattatgtacatagttgtcgttgtagggtataggatttatgatgtggttctgagtccgtctcatggaattgaactatctgttggagaaaagcttgtcttaaattgtacagcaagaactgaactaaatgtggggattgacttcaactgggaatacccttcttcgaagcatcagcataagaaacttgtaaaccgagacctaaaaacccagtctgggagtgagatgaagaaatttttgagcaccttaactatagatggtgtaacccggagtgaccaaggattgtacacctgtgcagcatccagtgggctgatgaccaagaagaacagcacatttgtcagggtccatgaaaaaccttttgttgcttttggaagtggcatggaatctctggtggaagccacggtgggggagcgtgtcagaatccctgcgaagtaccttggttacccacccccagaaataaaatggtataaaaatggaataccccttgagtccaatcacacaattaaagcggggcatgtactgacgattatggaagtgagtgaaagagacacaggaaattacactgtcatccttaccaatcccatttcaaaggagaagcagagccatgtggtctctctggttgtgtatgtcccaccccagattggtgagaaatctctaatctctcctgtggattcctaccagtacggcaccactcaaacgctgacatgtacggtctatgccattcctcccccgcatcacatccactggtattggcagttggaggaagagtgcgccaacgagcccagccaagctgtctcagtgacaaacccatacccttgtgaagaatggagaagtgtggaggacttccagggaggaaataaaattgaagttaataaaaatcaatttgctctaattgaaggaaaaaacaaaactgtaagtacccttgttatccaagcggcaaatgtgtcagctttgtacaaatgtgaagcggtcaacaaagtcgggagaggagagagggtgatctccttccacgtgaccaggggtcctgaaattactttgcaacctgacatgcagcccactgagcaggagagcgtgtctttgtggtgcactgcagacagatctacgtttgagaacctcacatggtacaagcttggcccacagcctctgccaatccatgtgggagagttgcccacacctgtttgcaagaacttggatactctttggaaattgaatgccaccatgttctctaatagcacaaatgacattttgatcatggagcttaagaatgcatccttgcaggaccaaggagactatgtctgccttgctcaagacaggaagaccaagaaaagacattgcgtggtcaggcagctcacagtcctagagcgtgtggcacccacgatcacaggaaacctggagaatcagacgacaagtattggggaaagcatcgaagtctcatgcacggcatctgggaatccccctccacagatcatgtggtttaaagataatgagacccttgtagaagactcaggcattgtattgaaggatgggaaccggaacctcactatccgcagagtgaggaaggaggacgaaggcctctacacctgccaggcatgcagtgttcttggctgtgcaaaagtggaggcatttttcataatagaaggtgcccaggaaaagacgaacttggaaatcattattctagtaggcacggcggtgattgccatgttcttctggctacttcttgtcatcatcctacggaccgttaagcgggccaatggaggggaactgaagacaggctacttgtccatcgtcatggatccagatgaactcccattggatgaacattgtgaacgactgccttatgatgccagcaaatgggaattccccagagaccggctgaagctaggtaagcctcttggccgtggtgcctttggccaagtgattgaagcagatgcctttggaattgacaagacagcaacttgcaggacagtagcagtcaaaatgttgaaagaaggagcaacacacagtgagcatcgagctctcatgtctgaactcaagatcctcattcatattggtcaccatctcaatgtggtcaaccttctaggtgcctgtaccaagccaggagggccactcatggtgattgtggaattctgcaaatttggaaacctgtccacttacctgaggagcaagagaaatgaatttgtcccctacaagaccaaaggggcacgattccgtcaagggaaagactacgttggagcaatccctgtggatctgaaacggcgcttggacagcatcaccagtagccagagctcagccagctctggatttgtggaggagaagtccctcagtgatgtagaagaagaggaagctcctgaagatctgtataaggacttcctgaccttggagcatctcatctgttacagcttccaagtggctaagggcatggagttcttggcatcgcgaaagtgtatccacagggacctggcggcacgaaatatcctcttatcggagaagaacgtggttaaaatctgtgactttggcttggcccgggatatttataaagatccagattatgtcagaaaaggagatgctcgcctccctttgaaatggatggccccagaaacaatttttgacagagtgtacacaatccagagtgacgtctggtcttttggtgttttgctgtgggaaatattttccttaggtgcttctccatatcctggggtaaagattgatgaagaattttgtaggcgattgaaagaaggaactagaatgagggcccctgattatactacaccagaaatgtaccagaccatgctggactgctggcacggggagtccagtcagagacccacgttttcagagttggtggaacatttgggaaatctcttgcaagctaatgctcagcaggatggcaaagactacattgttcttccgatatcagagactttgagcatggaagaggattctggactctctctgcctacctcacctgtttcctgtatggaggaggaggaagtatgtgaccccaaattccattatgacaacacagcaggaatcagtcagtatctgcagaacagtaagcgaaagagccggcctgtgagtgtaaaaacatttgaagatatcccgttagaagaaccagaagtaaaagtaatcccagatgacaaccagacggacagtggtatggttcttgcctcagaagagctgaaaactttggaagacagaaccaaattatctccatcttttggtggaatggtgcccagcaaaagcagggagtctgtggcatctgaaggctcaaaccagacaagcggctaccagtccggatatcactccgatgacacagacaccaccgtgtactccagtgaggaagcagaacttttaaagctgatagagattggagtgcaaaccggtagcacagcccagattctccagcctgactcggggaccacactgagctctcctcctgtttaa

SEQ ID NO: 791 - DNA, 4092 bp, Homo sapiens
atgcagcggggcgccgcgctgtgcctgcgactgtggctctgcctgggactcctggacggcctggtgagtgactactccatgacccccccgaccttgaacatcacggaggagtcacacgtcatcgacaccggtgacagcctgtccatctcctgcaggggacagcaccccctcgagtgggcttggccaggagctcaggaggcgccagccaccggagacaaggacagcgaggacacgggggtggtgcgagactgcgagggcacagacgccaggccctactgcaaggtgttgctgctgcacgaggtacatgccaacgacacaggcagctacgtctgctactacaagtacatcaaggcacgcatcgagggcaccacggccgccagctcctacgtgttcgtgagagactttgagcagccattcatcaacaagcctgacacgctcttggtcaacaggaaggacgccatgtgggtgccctgtctggtgtccatccccggcctcaatgtcacgctgcgctcgcaaagctcggtgctgtggccagacgggcaggaggtggtgtgggatgaccggcggggcatgctcgtgtccacgccactgctgcacgatgccctgtacctgcagtgcgagaccacctggggagaccaggacttcctttccaaccccttcctggtgcacatcacaggcaacgagctctatgacatccagctgttgcccaggaagtcgctggagctgctggtaggggagaagctggtcctcaactgcaccgtgtgggctgagtttaactcaggtgtcacctttgactgggactacccagggaagcaggcagagcggggtaagtgggtgcccgagcgacgctcccaacagacccacacagaactctccagcatcctgaccatccacaacgtcagccagcacgacctgggctcgtatgtgtgcaaggccaacaacggcatccagcgatttcgggagagcaccgaggtcattgtgcatgaaaatcccttcatcagcgtcgagtggctcaaaggacccatcctggaggccacggcaggagacgagctggtgaagctgcccgtgaagctggcagcgtaccccccgcccgagttccagtggtacaaggatggaaaggcactgtccgggcgccacagtccacatgccctggtgctcaaggaggtgacagaggccagcacaggcacctacaccctcgccctgtggaactccgctgctggcctgaggcgcaacatcagcctggagctggtggtgaatgtgcccccccagatacatgagaaggaggcctcctcccccagcatctactcgcgtcacagccgccaggccctcacctgcacggcctacggggtgcccctgcctctcagcatccagtggcactggcggccctggacaccctgcaagatgtttgcccagcgtagtctccggcggcggcagcagcaagacctcatgccacagtgccgtgactggagggcggtgaccacgcaggatgccgtgaaccccatcgagagcctggacacctggaccgagtttgtggagggaaagaataagactgtgagcaagctggtgatccagaatgccaacgtgtctgccatgtacaagtgtgtggtctccaacaaggtgggccaggatgagcggctcatctacttctatgtgaccaccatccccgacggcttcaccatcgaatccaagccatccgaggagctactagagggccagccggtgctcctgagctgccaagccgacagctacaagtacgagcatctgcgctggtaccgcctcaacctgtccacgctgcacgatgcgcacgggaacccgcttctgctcgactgcaagaacgtgcatctgttcgccacccctctggccgccagcctggaggaggtggcacctggggcgcgccacgccacgctcagcctgagtatcccccgcgtcgcgcccgagcacgagggccactatgtgtgcgaagtgcaagaccggcgcagccatgacaagcactgccacaagaagtacctgtcggtgcaggccctggaagcccctcggctcacgcagaacttgaccgacctcctggtgaacgtgagcgactcgctggagatgcagtgcttggtggccggagcgcacgcgcccagcatcgtgtggtacaaagacgagaggctgctggaggaaaagtctggagtcgacttggcggactccaaccagaagctgagcatccagcgcgtgcgcgaggaggatgcgggaccgtatctgtgcagcgtgtgcagacccaagggctgcgtcaactcctccgccagcgtggccgtggaaggctccgaggataagggcagcatggagatcgtgatccttgtcggtaccggcgtcatcgctgtcttcttctgggtcctcctcctcctcatcttctgtaacatgaggaggccggcccacgcagacatcaagacgggctacctgtccatcatcatggaccccggggaggtgcctctggaggagcaatgcgaatacctgtcctacgatgccagccagtgggaattcccccgagagcggctgcacctggggagagtgctcggctacggcgccttcgggaaggtggtggaagcctccgctttcggcatccacaagggcagcagctgtgacaccgtggccgtgaaaatgctgaaagagggcgccacggccagcgagcaccgcgcgctgatgtcggagctcaagatcctcattcacatcggcaaccacctcaacgtggtcaacctcctcggggcgtgcaccaagccgcagggccccctcatggtgatcgtggagttctgcaagtacggcaacctctccaacttcctgcgcgccaagcgggacgccttcagcccctgcgcggagaagtctcccgagcagcgcggacgcttccgcgccatggtggagctcgccaggctggatcggaggcggccggggagcagcgacagggtcctcttcgcgcggttctcgaagaccgagggcggagcgaggcgggcttctccagaccaagaagctgaggacctgtggctgagcccgctgaccatggaagatcttgtctgctacagcttccaggtggccagagggatggagttcctggcttcccgaaagtgcatccacagagacctggctgctcggaacattctgctgtcggaaagcgacgtggtgaagatctgtgactttggccttgcccgggacatctacaaagaccccgactacgtccgcaagggcagtgcccggctgcccctgaagtggatggcccctgaaagcatcttcgacaaggtgtacaccacgcagagtgacgtgtggtcctttggggtgcttctctgggagatcttctctctgggggcctccccgtaccctggggtgcagatcaatgaggagttctgccagcgcgtgagagacggcacaaggatgagggccccggagctggccactcccgccatacgccacatcatgctgaactgctggtccggagaccccaaggcgagacctgcattctcggagctggtggagatcctgggggacctgctccagggcaggggcctgcaagaggaagaggaggtctgcatggccccgcgcagctctcagagctcagaagagggcagcttctcgcaggtgtccaccatggccctacacatcgcccaggctgacgctgaggacagcccgccaagcctgcagcgccacagcctggccgccaggtattacaactgggtgtcctttcccgggtgcctggccagaggggctgagacccgtggttcctccaggatgaagacatttgaggaattccccatgaccccaacgacctacaaaggctctgtggacaaccagacagacagtgggatggtgctggcctcggaggagtttgagcagatagagagcaggcatagacaagaaagcggcttcagctgtaaaggacctggccagaatgtggctgtgaccagggcacaccctgactcccaagggaggcggcggcggcctgagcggggggcccgaggaggccaggtgttttacaacagcgagtatggggagctgtcggagccaagcgaggaggaccactgctccccgtctgcccgcgtgactttcttcacagacaacagctactaa

SEQ ID NO: 792 - DNA, 4092 bp, Homo sapiens
atgcagcggggcgccgcgctgtgcctgcgactgtggctctgcctgggactcctggacggcctggtgagtgactactccatgacccccccgaccttgaacatcacggaggagtcacacgtcatcgacaccggtgacagcctgtccatctcctgcaggggacagcaccccctcgagtgggcttggccaggagctcaggaggcgccagccaccggagacaaggacagcgaggacacgggggtggtgcgagactgcgagggcacagacgccaggccctactgcaaggtgttgctgctgcacgaggtacatgccaacgacacaggcagctacgtctgctactacaagtacatcaaggcacgcatcgagggcaccacggccgccagctcctacgtgttcgtgagagactttgagcagccattcatcaacaagcctgacacgctcttggtcaacaggaaggacgccatgtgggtgccctgtctggtgtccatccccggcctcaatgtcacgctgcgctcgcaaagctcggtgctgtggccagacgggcaggaggtggtgtgggatgaccggcggggcatgctcgtgtccacgccactgctgcacgatgccctgtacctgcagtgcgagaccacctggggagaccaggacttcctttccaaccccttcctggtgcacatcacaggcaacgagctctatgacatccagctgttgcccaggaagtcgctggagctgctggtaggggagaagctggtcctcaactgcaccgtgtgggctgagtttaactcaggtgtcacctttgactgggactacccagggaagcaggcagagcggggtaagtgggtgcccgagcgacgctcccaacagacccacacagaactctccagcatcctgaccatccacaacgtcagccagcacgacctgggctcgtatgtgtgcaaggccaacaacggcatccagcgatttcgggagagcaccgaggtcattgtgcatgaaaatcccttcatcagcgtcgagtggctcaaaggacccatcctggaggccacggcaggagacgagctggtgaagctgcccgtgaagctggcagcgtaccccccgcccgagttccagtggtacaaggatggaaaggcactgtccgggcgccacagtccacatgccctggtgctcaaggaggtgacagaggccagcacaggcacctacaccctcgccctgtggaactccgctgctggcctgaggcgcaacatcagcctggagctggtggtgaatgtgcccccccagatacatgagaaggaggcctcctcccccagcatctactcgcgtcacagccgccaggccctcacctgcacggcctacggggtgcccctgcctctcagcatccagtggcactggcggccctggacaccctgcaagatgtttgcccagcgtagtctccggcggcggcagcagcaagacctcatgccacagtgccgtgactggagggcggtgaccacgcaggatgccgtgaaccccatcgagagcctggacacctggaccgagtttgtggagggaaagaataagactgtgagcaagctggtgatccagaatgccaacgtgtctgccatgtacaagtgtgtggtctccaacaaggtgggccaggatgagcggctcatctacttctatgtgaccaccatccccgacggcttcaccatcgaatccaagccatccgaggagctactagagggccagccggtgctcctgagctgccaagccgacagctacaagtacgagcatctgcgctggtaccgcctcaacctgtccacgctgcacgatgcgcacgggaacccgcttctgctcgactgcaagaacgtgcatctgttcgccacccctctggccgccagcctggaggaggtggcacctggggcgcgccacgccacgctcagcctgagtatcccccgcgtcgcgcccgagcacgagggccactatgtgtgcgaagtgcaagaccggcgcagccatgacaagcactgccacaagaagtacctgtcggtgcaggccctggaagcccctcggctcacgcagaacttgaccgacctcctggtgaacgtgagcgactcgctggagatgcagtgcttggtggccggagcgcacgcgcccagcatcgtgtggtacaaagacgagaggctgctggaggaaaagtctggagtcgacttggcggactccaaccagaagctgagcatccagcgcgtgcgcgaggaggatgcgggaccgtatctgtgcagcgtgtgcagacccaagggctgcgtcaactcctccgccagcgtggccgtggaaggctccgaggataagggcagcatggagatcgtgatccttgtcggtaccggcgtcatcgctgtcttcttctgggtcctcctcctcctcatcttctgtaacatgaggaggccggcccacgcagacatcaagacgggctacctgtccatcatcatggaccccggggaggtgcctctggaggagcaatgcgaatacctgtcctacgatgccagccagtgggaattcccccgagagcggctgcacctggggagagtgctcggctacggcgccttcgggaaggtggtggaagcctccgctttcggcatccacaagggcagcagctgtgacaccgtggccgtgaaaatgctgaaagagggcgccacggccagcgagcagcgcgcgctgatgtcggagctcaagatcctcattcacatcggcaaccacctcaacgtggtcaacctcctcggggcgtgcaccaagccgcagggccccctcatggtgatcgtggagttctgcaagtacggcaacctctccaacttcctgcgcgccaagcgggacgccttcagcccctgcgcggagaagtctcccgagcagcgcggacgcttccgcgccatggtggagctcgccaggctggatcggaggcggccggggagcagcgacagggtcctcttcgcgcggttctcgaagaccgagggcggagcgaggcgggcttctccagaccaagaagctgaggacctgtggctgagcccgctgaccatggaagatcttgtctgctacagcttccaggtggccagagggatggagttcctggcttcccgaaagtgcatccacagagacctggctgctcggaacattctgctgtcggaaagcgacgtggtgaagatctgtgactttggccttgcccgggacatctacaaagaccccgactacgtccgcaagggcagtgcccggctgcccctgaagtggatggcccctgaaagcatcttcgacaaggtgtacaccacgcagagtgacgtgtggtcctttggggtgcttctctgggagatcttctctctgggggcctccccgtaccctggggtgcagatcaatgaggagttctgccagcgcgtgagagacggcacaaggatgagggccccggagctggccactcccgccatacgccacatcatgctgaactgctggtccggagaccccaaggcgagacctgcattctcggagctggtggagatcctgggggacctgctccagggcaggggcctgcaagaggaagaggaggtctgcatggccccgcgcagctctcagagctcagaagagggcagcttctcgcaggtgtccaccatggccctacacatcgcccaggctgacgctgaggacagcccgccaagcctgcagcgccacagcctggccgccaggtattacaactgggtgtcctttcccgggtgcctggccagaggggctgagacccgtggttcctccaggatgaagacatttgaggaattccccatgaccccaacgacctacaaaggctctgtggacaaccagacagacagtgggatggtgctggcctcggaggagtttgagcagatagagagcaggcatagacaagaaagcggcttcagctgtaaaggacctggccagaatgtggctgtgaccagggcacaccctgactcccaagggaggcggcggcagcctgagcggggggcccgaggaggccaggtgttttacaacagcgagtatggggagctgtcggagccaagcgaggaggaccactgctccccgtctgcccgcgtgactttcttcacagacaacagctactaa

SEQ ID NO: 793 - DNA, 1850 bp, Homo sapiens
atgccagaccccgcggcgcacctgcccttcttctacggcagcatctcgcgtgccgaggccgaggagcacctgaagctggcgggcatggcggacgggctcttcctgctgcgccagtgcctgcgctcgctgggcggctatgtgctgtcgctcgtgcacgatgtgcgcttccaccactttcccatcgagcgccagctcaacggcacctacgccattgccggcggcaaagcgcactgtggaccggcagagctctgcgagttctactcgcgcgaccccgacgggctgccctgcaacctgcgcaagccgtgcaaccggccgtcgggcctcgagccgcagccgggggtcttcgactgcctgcgagacgccatggtgcgtgactacgtgcgccagacgtggaagctggagggcgaggccctggagcaggccatcatcagccaggccccgcaggtggagaagctcattgctacgacggcccacgagcggatgccctggtaccacagcagcctgacgcgtgaggaggccgagcgcaaactttactctggggcgcagaccgacggctgaggccgcggaaggagcagggcacatacgccctgtccctcatctatgggaagacggtgtaccactacctcatcagccaagacaaggcgggcaagtactgcattcccgagggcaccaagtttgacacgctctggcagctggtggagtatctgaagctgaaggcggacgggctcatctactgcctgaaggaggcctgccccaacagcagtgccagcaacgcctcaggggctgctgctcccacactcccagcccacccatccacgttgactcatcctcagagacgaatcgacaccctcaactcagatggatacacccctgagccagcacgcataacgtccccagacaaaccgcggccgatgcccatggacacgagcgtgtatgagagcccctacagcgacccagaggagctcaaggacaagaagctcttcctgaagcgcgataacctcctcatagctgacattgaacttggctgcggcaactttggctcagtgcgccagggcgtgtaccgcatgcgcaagaagcagatcgacgtggccatcaaggtgctgaagcagggcacggagaaggcagacacggaagagatgatgcgcgaggcgcagatcatgcaccagctggacaacccctacatcgtgcggctcattggcgtctgccaggccgaggccctcatgctggtcatggagatggctgggggcgggccgctgcacaagttcctggtcggcaagagggaggagatccctgtgagcaatgtggccgagctgctgcaccaggtgtccatggggatgaagtacctggaggagaagaactttgtgcaccgtgacctggcggcccgcaacgtcctgctggttaaccggcactacgccaagatcagcgactttggcctctccaaagcactgggtgccgacgacagctactacactgcccgctcagcagggaagtggccgctcaagtggtacgcacccgaatgcatcaacttccgcaagttctccagccgcagcgatgtctggagctatggggtcaccatgtgggaggccttgtcctacggccagaagccctacaagaagatgaaagggccggaggtcatggccttcatcgagcagggcaagcggatggagtgcccaccagagtgtccacccgaactgtacgcactcatgagtgactgctggatctacaagtgggaggatcgccccgacttcctgaccgtggagcagcgcatgcgagcctgttactacagcctggccagcaaggtggaagggcccccaggcagcacacagaaggctgaggctgcctgtgcctga

SEQ ID NO: 794 - DNA, 1842 bp, Homo sapiens
atgccagaccccgcggcgcacctgcccttcttctacggcagcatctcgcgtgccgaggccgaggagcacctgaagctggcgggcatggcggacgggctcttcctgctgcgccagtgcctgcgctcgctgggcggctatgtgctgtcgctcgtgcacgatgtgcgcttccaccactttcccatcgagcgccagctcaacggcacctacgccattgccggcggcaaagcgcactgtggaccggcagagctctgcgagttctactcgcgcgaccccgacgggctgccctgcaacctgcgcaagccgtgcaaccggccgtcgggcctcgagccgcagccgggggtcttcgactgcctgcgagacgccatggtgcgtgactacgtgcgccagacgtggaagctggagggcgaggccctggagcaggccatcatcagccaggccccgcaggtggagaagctcattgctacgacggcccacgagcggatgccctggtaccacagcagcctgacgcgtgaggaggccgagcgcaaactttactctggggcgcagaccgacggcaagttcctgctgaggccgcggaaggagcagggcacatacgccctgtccctcatctatgggaagacggtgtaccactacctcatcagccaagacaaggcgggcaagtactgcattcccgagggcaccaagtttgacacgctctggcagctggtggagtatctgaagctgaaggcggacgggctcatctactgcctgaaggaggcctgccccaacagcagtgccagcaacgcctcaggggctgctgctcccacactcccagcccacccatccacgttgactcatcctcagagacgaatcgacaccctcaactcagatggatacacccctgagccagacaaaccgcggccgatgcccatggacacgagcgtgtatgagagcccctacagcgacccagaggagctcaaggacaagaagctcttcctgaagcgcgataacctcctcatagctgacattgaacttggctgcggcaactttggctcagtgcgccagggcgtgtaccgcatgcgcaagaagcagatcgacgtggccatcaaggtgctgaagcagggcacggagaaggcagacacggaagagatgatgcgcgaggcgcagatcatgcaccagctggacaacccctacatcgtgcggctcattggcgtctgccaggccgaggccctcatgctggtcatggagatggctgggggcgggccgctgcacaagttcctggtcggcaagagggaggagatccctgtgagcaatgtggccgagctgctgcaccaggtgtccatggggatgaagtacctggaggagaagaactttgtgcaccgtgacctggcggcccgcaacgtcctgctggttaaccggcactacgccaagatcagcgactttggcctctccaaagcactgggtgccgacgacagctactacactgcccgctcagcagggaagtggccgctcaagtggtacgcacccgaatgcatcaacttccgcaagttctccagccgcagcgatgtctggagctatggggtcaccatgtgggaggccttgtcctacggccagaagccctacaagaagatgaaagggccggaggtcatggccttcatcgagcagggcaagcggatggagtgcccaccagagtgtccacccgaactgtacgcactcatgagtgactgctggatctacaagtgggaggatcgccccgacttcctgaccgtggagcagcgcatgcgagcctgttactacagcctggccagcaaggtggaagggcccccaggcagcacacagaaggctgaggctgcctgtgcctga
